(19) United States
(12) Patent Application Publication
(10) Pub. No.: US 2025/0066791 A1
(43) Pub. Date: Feb. 27, 2025

(54) RNA INTERFERENCE MEDIATED INHIBITION OF PROLYL HYDROXYLASE DOMAIN 2 (PHD2) GENE EXPRESSION USING SHORT INTERFERING NUCLEIC ACID (SINA)

(71) Applicant: Sirna Therapeutics, Inc., Cambridge, MA (US)

(72) Inventors: Brandon Ason, Pacifica, CA (US); Duncan Brown, Berkeley, CA (US); Walter R. Strapps, Dedham, MA (US)

(21) Appl. No.: 18/594,238

(22) Filed: Mar. 4, 2024

Related U.S. Application Data
(63) Continuation of application No. 17/711,114, filed on Apr. 1, 2022, now Pat. No. 11,952,573.
Application No. 17/711,114 is a continuation of application No. 16/750,083, filed on Jan. 23, 2020, now Pat. No. 11,332,745.
Application No. 16/750,083 is a division of application No. 15/666,909, filed on Aug. 2, 2017, now Pat. No. 10,577,606.
Application No. 15/666,909 is a continuation of application No. 14/955,156, filed on Dec. 1, 2015, now abandoned.
Application No. 14/955,156 is a continuation of application No. 13/818,310, filed on Feb. 22, 2013, now Pat. No. 9,233,997.
(60) Provisional application No. 61/377,409, filed on Aug. 26, 2010.

(51) Int. Cl. C12N 15/113; A61K 31/713; A61K 45/06; C07H 21/00; C07H 21/02

(52) U.S. Cl. CPC C12N 15/1137; A61K 31/713; A61K 45/06; C07H 21/00; C07H 21/02; C12N 2310/14; C12N 2310/315; C12N 2310/317; C12N 2310/321; C12N 2310/322; C12N 2310/332; C12N 2310/3525; C12N 2310/3533

(57) ABSTRACT

The present invention relates to compounds, compositions, and methods for the study, diagnosis, and treatment of traits, diseases and conditions that respond to the modulation of PHD2 gene expression and/or activity, and/or modulate a beta-catenin gene expression pathway. Specifically, the invention relates to double-stranded nucleic acid molecules including small nucleic acid molecules, such as short interfering nucleic acid (siNA), short interfering RNA (siRNA), double-stranded RNA (dsRNA), micro-RNA (miRNA), and short hairpin RNA (shRNA) molecules that are capable of mediating or that mediate RNA interference (RNAi) against PHD2 gene expression.

### RELATED APPLICATIONS

[0001] This application is a continuation of Ser. No. 17/711,114, filed on Apr. 1, 2022, which is a continuation of Ser. No. 16/750,083, filed on Jan. 23, 2020, now U.S. Pat. No. 11,332,745, issued on May 17, 2022, which is a divisional application of application Ser. No. 15/666,909, filed on Aug. 2, 2017, now U.S. Pat. No. 10,577,606, issued on Mar. 3, 2020, which is a continuation of application Ser. No. 14/955,156, filed on Dec. 1, 2015, abandoned, which is a continuation of application Ser. No. 13/818,310, filed on Feb. 22, 2013, now U.S. Pat. No. 9,233,997, issued on Jan. 12, 2016, which is a 35 U.S.C. § 371 National Stage filing of International Application No. PCT/US2011/048957, filed on Aug. 24, 2011, which claims the benefit of and priority to U.S. Provisional Patent Application Ser. No. 61/377,409, filed on Aug. 26, 2010. The entire contents of each of the foregoing patent applications are incorporated herein by reference.

### SEQUENCE LISTING

[0002] The instant application contains a Sequence Listing which has been submitted electronically in XML format and is hereby incorporated by reference in its entirety. Said XML copy, created on Oct. 21, 2024, is named 121301-01507_SL.xml and is 5,640,675 bytes in size.

### BACKGROUND OF THE INVENTION

[0003] Anemia is a disease condition in which patients have low hemoglobin (Hb) levels. (Beutler et al., 2006, Blood 107:1747-50). Hb is an iron-containing metalloprotein in red blood cells (RBCs) that delivers oxygen, an essential substrate for energy metabolism, from the lungs to tissues and removes carbon dioxide, a metabolic by-product, away from tissues to the lungs for biological functions and survival. (Perutz M. F., 1976, Br Med Bull 32:195-208). Decreased Hb levels resulting from anemia can lead to hypoxia in various organs and, therefore, cause patients severe clinical complications, such as severe fatigue, dyspnea, heart problems, nerve damage, impaired mental function and even death. The cause of anemia is multifactorial: blood loss, increased RBC destruction (e.g., hemolytic anemia), and decreased or faulty RBC production (e.g., iron deficiency and sickle cell anemia). Anemia, however, may be just the tip of an iceberg of an underlying disease. For example, about 80% of patients with chronic kidney disease (CKD) developed anemia because of decreased production of erythropoietin (EPO) in the kidney. (Brown R., 1965, Br Med J 2:1036-8). EPO is an essential growth factor that stimulates the production of RBCs, that is, erythropoiesis, and maintains their viability. Patients with rheumatoid arthritis, chronic inflammatory and infectious disorders, chronic heart failure, and cancers or undergoing chemotherapy often become anemic due to deficiency of EPO production. EPO is a hormone that regulates erythropoiesis.

[0004] Hypoxia-inducible factor (HIF) is a heterodimeric gene transcription factor that regulates EPO production and is recognized as a primary regulator of the cellular response to low oxygen. (Semenza, G. L., 1999, Annu Rev Cell Dev Biol 15:551-78) HIF itself, however, is not directly responsive to cellular oxygen levels. This oxygen sensing function is performed by a conserved family of nonheme Fe²⁺-containing dioxygenases, that is, prolyl hydroxylase domain-containing proteins (PHDs), PHD1, PHD2, and PHD3, which use oxygen and 2-oxoglutarate (2-OG) as substrates and iron and ascorbate as cofactors. These PHD isozymes in mammalian cells hydroxylate HIF prolines: 407-amino-acid PHD1 (also known as HIF prolyl hydroxylase 3 (HPH-3) or egg-laying defective nine homologue 2 (EGLN-2)), 426-amino-acid PHD2 (i.e., HPH-2 or EGLN-1) and 239-amino-acid PHD3 (i.e., HPH-1 or EGLN-3). (Schfield et al., 2005, Biochem Biophys Res Commun 338:617-26).

[0005] PHD2, one of the most extensively studied HIF prolyl 4-hydroxylases, is the key oxygen sensor setting low steady state levels of HIF-1a in vivo under normoxia. (Berra et al., 2003, EMBO J 22:4082-90 and Berchner-Pfannschmidt et al., 2008J Biol Chem 283:31745-53). Like other members of Fe2+- and 2-OG-dependent dioxygenases, PHD2 contains a double-stranded b-helix fold (jelly roll motif) comprising of two b-sheets consisting of eight antiparallel b-strands (Clifton et al., 2006, J Inorg Biochem 100:644-69 and Ozer et al., 2007, Nat Chem Biol 3:144-53). This characteristic structural topology arranges conserved residues to form the catalytic center of these 2-OG dioxygenases. PHD2 displays a narrow entrance to the active site and a deep binding pocket compared to other 2-OG dioxygenases.

[0006] Under normal oxygenation, the hydroxylation of two of the proline residues of HIF-α by the HIF-PHDs targets it for proteosomal degradation via the Von Hippel Lindau-E3 ubiquitin ligase complex and serves to control constitutive levels of HIF heterodimers. (Ivan et al., 2001, Science 292:464-8; Jaakkola et al., 2001, Science 292:468-72; Yu et al., 2001, Proc Natl Acad Sci USA 98:9630-5; and Min et al., 2002, Science 296:1886-9).

[0007] Interestingly, PHDs are upregulated by hypoxia, providing a HIF-dependent auto-regulatory feedback loop mechanism, limiting overexpression of hypoxia-inducible genes. (Stiehl et al., 2006, J Biol Chem 281:23482-91). In low oxygen environments, hypoxia and prolyl hydroxylase (PHD) enzyme inhibition leads to stabilization of hypoxia inducible factor (HIF)-α subunits by preventing their association with the von Hippel Lindau tumor suppressor-E3 ubiquitin ligase complex which otherwise would target this transcription factor for proteosomal degradation. HIF-α, in association with HIF-1β subunits, then regulates erythropoietin (EPO) gene expression to increase plasma EPO levels. EPO, in turn, promotes differentiation and proliferation of erythroid precursors into mature red blood cells. In addition, HIF-α subunits also regulate other target genes which support erythropoiesis including iron transporters, transferrin and transferrin receptor.

[0008] Independent reports on the conditional inactivation of HIF-PHD2 in the mouse (Minamishima et al., 2008, Blood Mar. 15; 111(6):3236-44 and Takeda et al., 2006, Mol Cell Biol. November 26; (22):8336-46) as well as the characterization of two HIF-PHD2 mutations in man (Percy et al., 2006, Proc Natl Acad Sci USA January 17; 103(3):654-9 and Percy et al., 2007, Blood. September 15; 110(6):2193-6) point to HIF-PHD2 inhibition as being sufficient to stimulate erythropoiesis. This is supported by recent genetic studies on idiopathic erthrocytosis that have indicated that HIF-2a/PHD2/VHL pathway is the core molecular machinery regulating EPO in humans. (Lee, F. S., 2008, Blood Rev 22:321-32).

[0009] The pivotal role that PHD enzymes play in the regulation of the cellular response to hypoxia has promoted the development of small molecule PHD inhibitors to stabilize HIF under normoxia for the treatment of anemia and ischemia diseases. (Myllyharju J., 2009, Curr Pharm Des 15:3878-85 and Bruegge et al., 2007, Curr Med Chem 14:1853-62). For example, several small molecules are currently in clinical trials for the stimulation of erythropoiesis via HIF-PHD inhibition/HIF stabilization with a HIF-PHD pan-inhibitor. (Lin et al., 2010, Expert Opin. Ther. Patent 20(9)1219-1245).

[0010] Molecules that impact cellular response to hypoxia and in particular erythropoiesis have important therapeutic value for the treatment of anemia and other associated diseases. Thus, there is a need for molecules that selectively inhibit the PHD isozyme involved in the core molecular machinery regulating EPO, i.e., PHD2 gene expression.

[0011] Alteration of gene expression, specifically PHD2 gene expression, through RNA interference (hereinafter “RNAi”) is one approach for meeting this need. RNAi is induced by short single-stranded RNA (“ssRNA”) or double-stranded RNA (“dsRNA”) molecules. The short dsRNA molecules, called “short interfering nucleic acids (“siNA”)” (see e.g., PCT/US03/05346) or “short interfering RNA” or “siRNA” or “RNAi inhibitors” silence the expression of messenger RNAs (“mRNAs”) that share sequence homology to the siNA. This can occur via cleavage of the mRNA mediated by an endonuclease complex containing a siNA, commonly referred to as an RNA-induced silencing complex (RISC). Cleavage of the target RNA typically takes place in the middle of the region complementary to the guide sequence of the siNA duplex (Elbashir et al., 2001, Genes Dev., 15:188). In addition, RNA interference can also involve small RNA (e.g., micro-RNA or miRNA) mediated gene silencing, presumably through cellular mechanisms that either inhibit translation or that regulate chromatin structure and thereby prevent transcription of target gene sequences (see for example Allshire, 2002, Science, 297:1818-1819; Volpe et al., 2002, Science, 297:1833-1837; Jenuwein, 2002, Science, 297:2215-2218; and Hall et al., 2002, Science, 297:2232-2237). Despite significant advances in the field of RNAi, there remains a need for agents that can inhibit PHD2 gene expression and that can treat disease associated with PHD2 expression such as anemia.

### SUMMARY OF THE INVENTION

[0012] The invention provides a solution to the problem of treating diseases that respond to the modulation of PHD1, PHD2, and/or PHD3 gene expression using novel short interfering nucleic acid (siNA) molecules to modulate PHD2 expression.

[0013] The present invention provides compounds, compositions, and methods useful for modulating the expression of PHD genes, specifically those PHD1, PHD2, and/or PHD3 genes associated with anemia and for treating such conditions by RNA interference (RNAi) using small nucleic acid molecules.

[0014] In particular, the instant invention features small nucleic acid molecules, i.e., short interfering nucleic acid (siNA) molecules including, but not limited to, short interfering RNA (siRNA), double-stranded RNA (dsRNA), micro-RNA (miRNA), short hairpin RNA (shRNA) and circular RNA molecules and methods used to modulate the expression of PHD1, PHD2, and/or PHD3 genes and/or other genes involved in pathways of PHD2 gene expression and/or activity.

[0015] In one aspect, the invention provides double-stranded short interfering nucleic acid (siNA) molecules that inhibit the expression of a PHD2 gene in a cell or mammal, wherein the double-stranded siNAs comprise a sense and an antisense stand. The antisense strand comprises a sequence that is complementary to at least a part of an RNA associated with the expression of the PHD2 gene. The sense strand comprises a sequence that is complementary to the antisense strand. In various embodiments, at least one strand comprises at least a 15 nucleotide sequence selected from the group of sequences consisting of SEQ ID NOS:1-1064. In certain embodiments, the antisense strand comprises at least 15 nucleotides having sequence complementarity to a target sequence set forth in Table 1a. In other and/or in the same embodiments, the antisense strand comprises at least a 15 nucleotide sequence of one of the antisense sequences set forth in Table 1b. In some embodiments, the sense strand comprises at least a 15 nucleotide sequence of a sense strand sequence as set forth in Table 1b.

[0016] In certain embodiments of this aspect of the invention, double-stranded short interfering nucleic acid (siNA) molecules are provided wherein the antisense stand comprises a modified sequence as set forth in Table 1c that has sequence complementarity to a target sequence of the invention. In some embodiments, the sense strand also comprises a modified sequence as set forth in Table 1c.

[0017] In certain embodiments, the present invention provides a double-stranded short interfering nucleic acid (siNA) molecule that modulates the expression of PHD2, wherein the siNA comprises a sense strand and an antisense strand; each strand is independently 15 to 30 nucleotides in length; and the antisense strand comprises at least 15 nucleotides having sequence complementary to any of:

(SEQ ID NO: 1)
5′-GAUGUGUGACAUGUAUAUA-3′;
(SEQ ID NO: 2)
5′-GUUAUGUACGUCAUGUUGA-3′;
(SEQ ID NO: 3)
5′-GUCAUGUUGAUAAUCCAAA-3′;
(SEQ ID NO: 4)
5′-GUGUGACAUGUAUAUAUUA-3′;
(SEQ ID NO: 5)
5′-UGUUGAUAAUCCAAAUGGA-3′;
(SEQ ID NO: 6)
5′-AACGGGUUAUGUACGUCAU-3′;
(SEQ ID NO: 7)
5′-GAUGGAAGAUGUGUGACAU-3′;
(SEQ ID NO: 8)
5′-UGUGUGACAUGUAUAUAUU-3′;
(SEQ ID NO: 9)
5′-GGAAGAUGUGUGACAUGUA-3′;
(SEQ ID NO: 10)
5′-CAUGUAUAUAUUAUCUUAA-3′;
(SEQ ID NO: 11)
5′-UUGAUAAUCCAAAUGGAGA-3′;
(SEQ ID NO: 13)
5′-UGGAAGAUGUGUGACAUGU-3′;
(SEQ ID NO: 25)
5′-GCAAUAACUGUUUGGUAUU-3′;
(SEQ ID NO: 33)
5′-CAUUGAACCCAAAUUUGAU-3′;
(SEQ ID NO: 46)
5′-AACCCAAAUUUGAUAGACU-3′;
(SEQ ID NO: 52)
5′-AUGCUACAAGGUACGCAAU-3′;
(SEQ ID NO: 54)
5′-AGCCCAGUUUGCUGACAUU-3′;
or
(SEQ ID NO: 79)
5′-CUAAAGUAAAAUAUCUAAC-3′.

[0018] In some embodiments of the invention, the antisense strand of a siNA molecule comprises at least a 15 nucleotide sequence of:

(SEQ ID NO: 880)
5′-UAUAUACAUGUCACACAUC-3′;
(SEQ ID NO: 881)
5′-UCAACAUGACGUACAUAAC-3′;
(SEQ ID NO: 882)
5′-UUUGGAUUAUCAACAUGAC-3′;
(SEQ ID NO: 883)
5′-UAAUAUAUACAUGUCACAC-3′;
(SEQ ID NO: 884)
5′-UCCAUUUGGAUUAUCAACA-3′;
(SEQ ID NO: 885)
5′-AUGACGUACAUAACCCGUU-3′;
(SEQ ID NO: 886)
5′-AUGUCACACAUCUUCCAUC-3′;
(SEQ ID NO: 887)
5′-AAUAUAUACAUGUCACACA-3′;
(SEQ ID NO: 888)
5′-UACAUGUCACACAUCUUCC-3′;
(SEQ ID NO: 889)
5′-UUAAGAUAAUAUAUACAUG-3′;
(SEQ ID NO: 890)
5′-UCUCCAUUUGGAUUAUCAA-3′;
(SEQ ID NO: 892)
5′-ACAUGUCACACAUCUUCCA-3′;
(SEQ ID NO: 904)
5′-AAUACCAAACAGUUAUUGC-3′;
(SEQ ID NO: 912)
5′-AUCAAAUUUGGGUUCAAUG-3′;
(SEQ ID NO: 925)
5′-AGUCUAUCAAAUUUGGGUU-3′;
(SEQ ID NO: 931)
5′-AUUGCGUACCUUGUAGCAU-3′;
(SEQ ID NO: 933)
5′-AAUGUCAGCAAACUGGGCU-3′;
or
(SEQ ID NO: 958)
5′-GUUAGAUAUUUUACUUUAG-3′.

[0019] In some embodiments, the sense strand of a siNA molecule of the invention comprises at least a 15 nucleotide sequence of:

(SEQ ID NO: 1)
5′-GAUGUGUGACAUGUAUAUA-3′;
(SEQ ID NO: 2)
5′-GUUAUGUACGUCAUGUUGA-3′;
(SEQ ID NO: 3)
5′-GUCAUGUUGAUAAUCCAAA-3′;
(SEQ ID NO: 4)
5′-GUGUGACAUGUAUAUAUUA-3′;
(SEQ ID NO: 5)
5′-UGUUGAUAAUCCAAAUGGA-3′;
(SEQ ID NO: 6)
5′-AACGGGUUAUGUACGUCAU-3′;
(SEQ ID NO: 7)
5′-GAUGGAAGAUGUGUGACAU-3′;
(SEQ ID NO: 8)
5′-UGUGUGACAUGUAUAUAUU-3′;
(SEQ ID NO: 9)
5′-GGAAGAUGUGUGACAUGUA-3′;
(SEQ ID NO: 10)
5′-CAUGUAUAUAUUAUCUUAA-3′;
(SEQ ID NO: 11)
5′-UUGAUAAUCCAAAUGGAGA-3′;
(SEQ ID NO: 13)
5′-UGGAAGAUGUGUGACAUGU-3′;
(SEQ ID NO: 25)
5′-GCAAUAACUGUUUGGUAUU-3′;
(SEQ ID NO: 33)
5′-CAUUGAACCCAAAUUUGAU-3′;
(SEQ ID NO: 46)
5′-AACCCAAAUUUGAUAGACU-3′;
(SEQ ID NO: 52)
5′-AUGCUACAAGGUACGCAAU-3′;
(SEQ ID NO: 54)
5′-AGCCCAGUUUGCUGACAUU-3′;
or
(SEQ ID NO: 79)
5′-CUAAAGUAAAAUAUCUAAC-3′.

[0020] In some embodiments, a siNA molecule of the invention comprises any of:

(SEQ ID NO: 1)
5′-GAUGUGUGACAUGUAUAUA-3′
and
(SEQ ID NO: 880)
5′-UAUAUACAUGUCACACAUC-3′;
or
(SEQ ID NO: 2)
5′-GUUAUGUACGUCAUGUUGA-3′
and
(SEQ ID NO: 881)
5′-UCAACAUGACGUACAUAAC-3′;
or
(SEQ ID NO: 3)
5′-GUCAUGUUGAUAAUCCAAA-3′
and
(SEQ ID NO: 882)
5′-UUUGGAUUAUCAACAUGAC-3′;
or
(SEQ ID NO: 4)
5′-GUGUGACAUGUAUAUAUUA-3′
and
(SEQ ID NO: 883)
5′-UAAUAUAUACAUGUCACAC-3′;
or
(SEQ ID NO: 5)
5′-UGUUGAUAAUCCAAAUGGA-3′
and
(SEQ ID NO: 884)
5′-UCCAUUUGGAUUAUCAACA-3′;
or
(SEQ ID NO: 6)
5′-AACGGGUUAUGUACGUCAU-3′
and
(SEQ ID NO: 885)
5′-AUGACGUACAUAACCCGUU-3′;
or
(SEQ ID NO: 7)
5′-GAUGGAAGAUGUGUGACAU-3′
and
(SEQ ID NO: 886)
5′-AUGUCACACAUCUUCCAUC-3′;
or
(SEQ ID NO: 8)
5′-UGUGUGACAUGUAUAUAUU-3′
and
(SEQ ID NO: 887)
5′-AAUAUAUACAUGUCACACA-3′;
or
(SEQ ID NO: 9)
5′-GGAAGAUGUGUGACAUGUA-3′
and
(SEQ ID NO: 888)
5′-UACAUGUCACACAUCUUCC-3′;
or
(SEQ ID NO: 10)
5′-CAUGUAUAUAUUAUCUUAA-3′
and
(SEQ ID NO: 889)
5′-UUAAGAUAAUAUAUACAUG-3′;
or
(SEQ ID NO: 11)
5′-UUGAUAAUCCAAAUGGAGA-3′
and
(SEQ ID NO: 890)
5′-UCUCCAUUUGGAUUAUCAA-3′;
or
(SEQ ID NO: 13)
5′-UGGAAGAUGUGUGACAUGU-3′
and
(SEQ ID NO: 892)
5′-ACAUGUCACACAUCUUCCA-3′;
or
(SEQ ID NO: 25)
5′-GCAAUAACUGUUUGGUAUU-3′
and
(SEQ ID NO: 904)
5′-AAUACCAAACAGUUAUUGC-3′;
or
(SEQ ID NO: 33)
5′-CAUUGAACCCAAAUUUGAU-3′
and
(SEQ ID NO: 912)
5′-AUCAAAUUUGGGUUCAAUG-3′;
or
(SEQ ID NO: 46)
5′-AACCCAAAUUUGAUAGACU-3′
and
(SEQ ID NO: 925)
5′-AGUCUAUCAAAUUUGGGUU-3′;
or
(SEQ ID NO: 52)
5′-AUGCUACAAGGUACGCAAU-3′
and
(SEQ ID NO: 931)
5′-AUUGCGUACCUUGUAGCAU-3′;
or
(SEQ ID NO: 54)
5′-AGCCCAGUUUGCUGACAUU-3′
and
(SEQ ID NO: 933)
5′-AAUGUCAGCAAACUGGGCU-3′;
or
(SEQ ID NO: 79)
5′-CUAAAGUAAAAUAUCUAAC-3′
and
(SEQ ID NO: 958)
5′-GUUAGAUAUUUUACUUUAG-3′.

[0021] In some embodiments, the invention features a double-stranded short interfering nucleic acid (siNA) molecule comprising any of R-008039846-001E, R-008039847-001N, R-008039882-001P, R-008039848-001X, R-008039849-001F, R-008053961-001S, R-008054086-001B, R-008147454-00S or any combination thereof (see Table 1c).

[0022] In some embodiments, the invention features a composition comprising any of R-008039846-001E, R-008039847-001N, R-008039882-001P, R-008039848-001X, R-008039849-001F, R-008053961-001S, R-008054086-001B, R-008147454-00S or any combination thereof.

[0023] In some embodiments, the invention features a composition comprising:
[0024] (a) a double-stranded short interfering nucleic acid (siNA) of the invention;
[0025] (b) a cationic lipid compound having any of compound numbers 1-46 or any combination thereof;
[0026] (c) cholesterol;
[0027] (d) DSPC; and
[0028] (e) PEG-DMG.

[0029] In some embodiments, the invention features a composition comprising R-008039846-001E, R-008039847-001N, R-008039882-001P, R-008039848-001X, R-008039849-001F, R-008053961-001S, R-008054086-001B, R-008147454-00S or any combination thereof and a pharmaceutically acceptable carrier or diluent.

[0030] In some embodiments, the invention features a composition comprising:
[0031] (a) R-008039846-001E, R-008039847-001N, R-008039882-001P, R-008039848-001X, R-008039849-001F, R-008053961-001S, R-008054086-001B, R-008147454-00S or any combination thereof;
[0032] (b) a cationic lipid;
[0033] (c) cholesterol;
[0034] (d) DSPC; and
[0035] (e) PEG-DMG.

[0036] In some embodiments, the invention features a composition comprising:
[0037] (a) R-008039846-001E, R-008039847-001N, R-008039882-001P, R-008039848-001X, R-008039849-001F, R-008053961-001S, R-008054086-001B, R-008147454-00S or any combination thereof;
[0038] (b) (13Z,16Z)—N,N-dimethyl-3-nonyldocosa-13,16-dien-1-amine;
[0039] (c) cholesterol;
[0040] (d) DSPC; and
[0041] (e) PEG-DMG.

[0042] In some embodiments, the invention features a composition comprising R-008039846-001E and R-008147454-00S.

[0043] In some embodiments, the invention features a composition comprising R-008039846-001E and R-008147454-00S and a pharmaceutically acceptable carrier or diluent.

[0044] In some embodiments, the invention features a composition comprising:
[0045] (a) R-008039846-001E and R-008147454-00S;
[0046] (b) a cationic lipid;
[0047] (c) cholesterol;
[0048] (d) DSPC; and
[0049] (e) PEG-DMG.

[0050] In some embodiments, the invention features a composition comprising:
[0051] (a) R-008039846-001E and R-008147454-00S;
[0052] (b) (13Z,16Z)—N,N-dimethyl-3-nonyldocosa-13,16-dien-1-amine;
[0053] (c) cholesterol;
[0054] (d) DSPC; and
[0055] (e) PEG-DMG.

[0056] In some embodiments, a composition of the invention comprises any Cationic Lipid having any of LNP 1, 2, 3, 4, 5, 6, 7, and/or 8 (see Table 10) in the following molar ratios:
[0057] Cationic Lipid/Cholesterol/PEG-DMG 56.6/38/5.4;
[0058] Cationic Lipid/Cholesterol/PEG-DMG 60/38/2;
[0059] Cationic Lipid/Cholesterol/PEG-DMG 67.3/29/3.7;
[0060] Cationic Lipid/Cholesterol/PEG-DMG 49.3/47/3.7;
[0061] Cationic Lipid/Cholesterol/PEG-DMG 50.3/44.3/5.4;
[0062] Cationic Lipid/Cholesterol/PEG-C-DMA/DSPC 40/48/2/10;
[0063] Cationic Lipid/Cholesterol/PEG-DMG/DSPC 40/48/2/10; and
[0064] Cationic Lipid/Cholesterol/PEG-DMG/DSPC 58/30/2/10.

[0065] In some embodiments, a composition of the invention comprises (13Z,16Z)—N,N-dimethyl-3-nonyldocosa-13,16-dien-1-amine, cholesterol, DSPC, and PEG-DMG, having a molar ratio of about 50:30:10:2 respectively.

[0066] In some embodiments, a composition of the invention further comprises a cryo-protectant. In some embodiments, the cryoprotectant is Sucrose, Trehalose, Raffinose, Stachyose, Verbascose, Mannitol, Glucose, Lactose, Maltose, Maltotriose-heptaose, Dextran, Hydroxyethyl Starch, Insulin, Sorbitol, Glycerol, Arginine, Histidine, Lysine, Proline, Dimethylsulfoxide or any combination thereof. In some embodiments, the cryoprotectant is Sucrose. In some embodiments, the cryoprotectant is Trehalose. In some embodiments, the cryoprotectant is a combination of Sucrose and Trehalose.

[0067] In some embodiments of the invention, all of the nucleotides of siNAs of the invention are unmodified. In other embodiments, one or more (e.g., 1, 2, 3, 4, 5, 6, 7, 8, 9, 10, 11, 12, 13, 14, 15, 16, 17, 18, 19, 20, 21, 22, 23, 24, 25, 26, 27, 28, 29, or 30) of the nucleotide positions independently in either one or both strands of an siNA molecule are modified. Modifications include nucleic acid sugar modifications, base modifications, backbone (internucleotide linkage) modifications, non-nucleotide modifications, and/or any combination thereof. In certain instances, purine and pyrimidine nucleotides are differentially modified. For example, purine and pyrimidine nucleotides can be differentially modified at the 2′-sugar position (i.e., at least one purine has a different modification from at least one pyrimidine in the same or different strand at the 2′-sugar position). In certain instances the purines are unmodified in one or both strands, while the pyrimidines in one or both strands are modified. In certain other instances, the pyrimidines are unmodified in one or both strands, while the purines in one or both strands are modified. In some instances, at least one modified nucleotide is a 2′-deoxy-2′-fluoro nucleotide, a 2′-deoxy nucleotide, or a 2′-O-alkyl nucleotide. In some instances, at least 5 or more of the pyrimidine nucleotides in one or both stands are either all 2′-deoxy-2′-fluoro or all 2′-O-methyl pyrimidine nucleotides. In some instances, at least 5 or more of the purine nucleotides in one or both stands are either all 2′-deoxy-2′-fluoro or all 2′-O-methyl purine nucleotides. In certain instances, wherein the siNA molecules comprise one or more modifications as described herein, the nucleotides at positions 1, 2, and 3 at the 5′ end of the guide (antisense) strand are unmodified.

[0068] In certain embodiments, the siNA molecules of the invention have 3′ overhangs of one, two, three, or four nucleotide(s) on one or both of the strands. In other embodiments, the siNA molecules lack overhangs (i.e., have blunt ends). Preferably, the siNA molecule has 3′ overhangs of two nucleotides on both the sense and antisense strands. The overhangs can be modified or unmodified. Examples of modified nucleotides in the overhangs include, but are not limited to, 2′-O-alkyl nucleotides, 2′-deoxy-2′-fluoro nucleotides, locked nucleic acid (LNA) nucleotides, or 2′-deoxy nucleotides. The overhang nucleotides in the antisense strand can comprise nucleotides that are complementary to nucleotides in the PHD2 target sequence. Likewise, the overhangs in the sense stand can comprise nucleotides that are in the PHD2 target sequence. In certain instances, the siNA molecules of the invention have two 3′ overhang nucleotides on the antisense stand that are 2′-O-alkyl (e.g., 2′-O-methyl) nucleotides and two 3′ overhang nucleotides on the sense stand that are 2′-deoxy nucleotides. In other instances, the siNA molecules of the invention have two 3′ overhang nucleotides that are 2′-O-alkyl (e.g., 2′-O-methyl) nucleotides on both the antisense stand and on the sense stand. In certain embodiments, the 2′-O-alkyl nucleotides are 2′-O-methyl uridine nucleotides. In certain instances, the overhangs also comprise one or more phosphorothioate linkages between nucleotides of the overhang.

[0069] In some embodiments, the siNA molecules of the invention have caps (also referred to herein as “terminal caps.” The cap can be present at the 5′-terminus (5′-cap) or at the 3′-terminus (3′-cap) or can be present on both termini, such as at the 5′ and 3′ termini of the sense strand of the siNA.

[0070] In some embodiments, the siNA molecules of the invention are phosphorylated at the 5′ end of the antisense strand. The phosphate group can be a phosphate, a diphosphate or a triphosphate.

[0071] The siNA molecules of the invention when double stranded can be symmetric or asymmetric. Each strand of these double stranded siNAs independently can range in nucleotide length between 3 and 30 nucleotides. Generally, each strand of the siNA molecules of the invention is about 15 to 30 (i.e., about 19, 20, 21, 22, 23 or 24) nucleotides in length.

[0072] The siNA molecules of the invention, which are double stranded or have a duplex structure, independently comprise about 3 to about 30 (e.g., about 3, 4, 5, 6, 7, 8, 9, 10, 11, 12, 13, 14, 15, 16, 17, 18, 19, 20, 21, 22, 23, 24, 25, 26, 27, 28, 29, or 30) base pairs. Generally, the duplex structure of siNAs of the invention is between 15 and 30, more generally between 18 and 25, yet more generally between 19 and 24, and most generally between 19 and 21 base pairs in length.

[0073] In certain embodiments, double-stranded short interfering nucleic acid (siNA) molecules are provided, wherein the molecule has a sense strand and an antisense strand and comprises formula (A):

[chemical structure]

[0074] wherein, the upper strand is the sense strand and the lower strand is the antisense strand of the double-stranded nucleic acid molecule; wherein the antisense strand comprises at least a 15 nucleotide sequence of SEQ ID NO: 880, SEQ ID NO: 881, SEQ ID NO: 882, SEQ ID NO: 883, SEQ ID NO: 884, SEQ ID NO: 885, SEQ ID NO: 886, SEQ ID NO: 887, SEQ ID NO: 888, SEQ ID NO: 889, SEQ ID NO: 890, SEQ ID NO: 892, SEQ ID NO: 904, SEQ ID NO: 912, SEQ ID NO: 925, SEQ ID NO: 931, SEQ ID NO: 933, or SEQ ID NO: 958, and the sense strand comprises a sequence having complementarity to the antisense strand;
[0075] each N is independently a nucleotide which is unmodified or chemically modified or a non-nucleotide;
[0076] each B is a terminal cap that is present or absent;
[0077] (N) represents overhanging nucleotides, each of which is independently unmodified or chemically modified;
[0078] [N] represents nucleotides that are ribonucleotides;
[0079] X1 and X2 are independently integers from 0 to 4;
[0080] X3 is an integer from 15 to 30;
[0081] X4 is an integer from 9 to 30; and
[0082] X5 is an integer from 0 to 6, provided that the sum of X4 and X5 is 15-30.

[0083] In one embodiment, the invention features a double-stranded short interfering nucleic acid (siNA) of formula (A); wherein
[0084] (a) one or more pyrimidine nucleotides in N_{X4} positions are independently 2′-deoxy-2′-fluoro nucleotides, 2′-O-alkyl nucleotides, 2′-deoxy nucleotides, ribonucleotides, or any combination thereof;
[0085] (b) one or more purine nucleotides in N_{X4} positions are independently 2′-deoxy-2′-fluoro nucleotides, 2′-O-alkyl nucleotides, 2′-deoxy nucleotides, ribonucleotides, or any combination thereof;
[0086] (c) one or more pyrimidine nucleotides in N_{X3} positions are independently 2′-deoxy-2′-fluoro nucleotides, 2′-O-alkyl nucleotides, 2′-deoxy nucleotides, ribonucleotides, or any combination thereof; and
[0087] (d) one or more purine nucleotides in N_{X3} positions are independently 2′-deoxy-2′-fluoro nucleotides, 2′-O-alkyl nucleotides, 2′-deoxy nucleotides, ribonucleotides,

[0088] The present invention further provides compositions comprising the double-stranded nucleic acid molecules described herein with optionally a pharmaceutically acceptable carrier or diluent.

[0089] The administration of the composition can be carried out by known methods, wherein the nucleic acid is introduced into a desired target cell in vitro or in vivo.

[0090] Commonly used techniques for introduction of the nucleic acid molecules of the invention into cells, tissues, and organisms include the use of various carrier systems, reagents and vectors. Non-limiting examples of such carrier systems suitable for use in the present invention include conjugates, nucleic-acid-lipid particles, lipid nanoparticles (LNP), liposomes, lipoplexes, micelles, virosomes, virus like particles (VLP), nucleic acid complexes, and mixtures thereof.

[0091] The compositions of the invention can be in the form of an aerosol, dispersion, solution (e.g., an injectable solution), a cream, ointment, tablet, powder, suspension or the like. These compositions may be administered in any suitable way, e.g. orally, sublingually, buccally, parenterally, nasally, or topically. In some embodiments, the compositions are aerosolized and delivered via inhalation.

[0092] The molecules and compositions of the present invention have utility over a broad range of therapeutic applications. Accordingly another aspect of this invention relates to the use of the compounds and compositions of the invention in treating a subject. The invention thus provides a method for treating a subject, such as a human, suffering from a condition which is mediated by the action, or by the loss of action, of PHD2, wherein the method comprises administering to the subject an effective amount of a double-stranded short interfering nucleic acid (siNA) molecule of the invention. In certain embodiments, the condition is anemia.

[0093] These and other aspects of the invention will be apparent upon reference to the following detailed description and attached figures. Moreover, it is contemplated that any method or composition described herein can be implemented with respect to any other method or composition described herein and that different embodiments may be combined.

[0094] Additionally, patents, patent applications, and other documents are cited throughout the specification to describe and more specifically set forth various aspects of this invention. Each of these references cited herein is hereby incorporated by reference in its entirety, including the drawings.

### BRIEF DESCRIPTION OF THE DRAWINGS

[0095] FIG. 1 shows a non-limiting proposed mechanistic representation of target RNA degradation involved in RNAi. Double-stranded RNA (dsRNA), which is generated by RNA-dependent RNA polymerase (RdRP) from foreign single-stranded RNA, for example viral, transposon, or other exogenous RNA, activates the DICER enzyme that in turn generates siNA duplexes. Alternately, synthetic or expressed siNA can be introduced directly into a cell by appropriate means. An active siNA complex forms that recognizes a target RNA, resulting in degradation of the target RNA by the RISC endonuclease complex or in the synthesis of additional RNA by RNA-dependent RNA polymerase (RdRP), which can activate DICER and result in additional siNA molecules, thereby amplifying the RNAi response.

[0096] FIG. 2 shows non-limiting examples of chemically modified siNA constructs of the present invention using a generalized structure of a representative siNA duplex. The specific modifications shown in the figure can be utilized alone or in combination with other modifications of the figure, in addition to other modifications and features described herein with reference to any siNA molecule of the invention. In the figure, N stands for any nucleotide or optionally a non-nucleotide as described here. The upper strand, having B—N_{X3}—(N)_{X2}—B-3′ is the sense (or passenger) strand of the siNA, whereas the lower strand, having B(N)_{X1}—N_{X4}—[N]_{X5}-5′ is the antisense (or guide) strand of the siNA. Nucleotides (or optional non-nucleotides) of internal portions of the sense strand are designated N_{X3} and nucleotides (or optional non-nucleotides) of internal portions of the antisense strand are designated N_{X4}. Nucleotides (or optional non-nucleotides) of the internal portions are generally base paired between the two strands, but can optionally lack base pairing (e.g. have mismatches or gaps) in some embodiments. Nucleotides (or optional non-nucleotides) of overhang regions are designated by parenthesis (N). Nucleotides of the 5′-terminal portion of the antisense strand are designated [N]. Terminal caps are optionally present at the 5′ and/or 3′ end of the sense strand and further optionally present at the 3′-end of the antisense strand. Generally, each strand can independently range from about 15 to about 30 nucleotides in length, but can vary depending on the presence of any overhang nucleotides. In certain embodiments, X1 and X2 are independently integers from 0 to 4; X3 is an integer from 15 to 30; X4 is an integer from 9 to 30; X5 is an integer from 0 to 6, provided that the sum of X4 and X5 is 15-30. Various modifications are shown for the nucleotides of the sense and antisense strands of the siNA constructs. The (N) overhang nucleotide positions can be chemically modified as described herein (e.g., 2′-O-methyl, 2′-deoxy-2′-fluoro, 2′-deoxy, LNA, universal bases etc.) and can be either derived from a corresponding target nucleic acid sequence or not. The constructs shown in the figure can also comprise phosphorothioate linkages as described herein. For example, phosphorothioate linkages can exist between any N, (N), and/or [N] positions. Such phosphorothioate incorporation can be utilized between purine “R” and pyrimidine “Y” positions, or for stabilization of pyrimidine linkages in general. Furthermore, although not depicted on the Figure, the constructs shown in the figure can optionally include a ribonucleotide at the 9^{th} position from the 5′-end of the sense strand or the 11^{th} position based on the 5′-end of the guide strand by counting 11 nucleotide positions in from the 5′-terminus of the guide strand. Similarly, the antisense strand can include a ribonucleotide at the 14^{th} position from the 5′-end, or alternately can be selected or designed so that a 2′-O-alkyl nucleotide (e.g., a 2′-O-methyl purine) is not present at this position. Furthermore, although not shown in the Figure, the 5′-terminal position of the antisense strand can comprise a terminal phosphate group as described herein. The antisense strand generally comprises sequence complementary to any target nucleic acid sequence of the invention, such as those set forth in Table 1a herein.

[0097] FIG. 3 shows non-limiting examples of certain combinations of modifications applied to the representative siNA duplex described in FIG. 2. The table shown below the representative structure provides specific combinations of (N)_{X1}, (N)_{X2}, N_{X3}, N_{X4}, and/or [N]_{X5} nucleotide (and optional non-nucleotide) positions. For example, combinations of 5 or more (e.g., 5, 6, 7, 8, 9, or 10 or more) N_{X3} and 5 or more (e.g., 5, 6, 7, 8, 9, or 10 or more) N_{X4} pyrimidine “Y” and purine “R” nucleotides are specified, each of which can independently have specific (N)_{X1}, and/or (N)_{X2}, substitutions as shown in the figure, in addition to optional phosphorothioate substitutions. The 5′-terminal antisense strand [N] nucleotides are generally ribonucleotides, but can also be modified or unmodified depending on if they are purine “R” or pyrimidine “Y” nucleotides

[0098] FIGS. 4A-C shows non-limiting examples of different siNA constructs of the invention. The criteria of the representative structures shown in FIGS. 2 and 3 can be applied to any of the structures shown in FIGS. 4A-C.

[0099] The examples shown in FIG. 4A (constructs 1, 2, 3, and 4) have 19 representative base pairs; however, different embodiments of the invention include any number of base pairs described herein. Bracketed regions represent nucleotide overhangs, for example, comprising about 1, 2, 3, or 4 nucleotides in length, preferably about 2 nucleotides. Constructs 1 and 2 can be used independently for RNAi activity. Construct 2 can comprise a polynucleotide or non-nucleotide linker, which can optionally be designed as a biodegradable linker. In one embodiment, the loop structure shown in construct 2 can comprise a biodegradable linker that results in the formation of construct 1 in vivo and/or in vitro. In another example, construct 3 can be used to generate construct 2 under the same principle wherein a linker is used to generate the active siNA construct 2 in vivo and/or in vitro, which can optionally utilize another biodegradable linker to generate the active siNA construct 1 in vivo and/or in vitro. As such, the stability and/or activity of the siNA constructs can be modulated based on the design of the siNA construct for use in vivo or in vitro and/or in vitro.

[0100] The examples shown in FIG. 4B represent different variations of double-stranded nucleic acid molecule of the invention, such as microRNA, that can include overhangs, bulges, loops, and stem-loops resulting from partial complementarity. Such motifs having bulges, loops, and stem-loops are generally characteristics of miRNA. The bulges, loops, and stem-loops can result from any degree of partial complementarity, such as mismatches or bulges of about 1, 2, 3, 4, 5, 6, 7, 8, 9, 10 or more nucleotides in one or both strands of the double-stranded nucleic acid molecule of the invention.

[0101] The example shown in FIG. 4C represents a model double-stranded nucleic acid molecule of the invention comprising a 19 base pair duplex of two 21 nucleotide sequences having dinucleotide 3′-overhangs. The top strand represents the sense strand (passenger strand), the middle strand represents the antisense (guide strand), and the lower strand represents a target polynucleotide sequence. The dinucleotide overhangs (NN) can comprise a sequence derived from the target polynucleotide. For example, the 3′-(NN) sequence in the guide strand can be complementary to the 5′-[NN] sequence of the target polynucleotide. In addition, the 5′-(NN) sequence of the passenger strand can comprise the same sequence as the 5′-[NN] sequence of the target polynucleotide sequence. In other embodiments, the overhangs (NN) are not derived from the target polynucleotide sequence, for example where the 3′-(NN) sequence in the guide strand are not complementary to the 5′-[NN] sequence of the target polynucleotide and the 5′-(NN) sequence of the passenger strand can comprise different sequence from the 5′-[NN] sequence of the target polynucleotide sequence. In additional embodiments, any (NN) nucleotides are chemically modified, e.g., as 2′-O-methyl, 2′-deoxy-2′-fluoro, and/or other modifications herein. Furthermore, the passenger strand can comprise a ribonucleotide position N of the passenger strand. For the representative 19 base pair 21 mer duplex shown, position N can be 9 nucleotides in from the 3′ end of the passenger strand. However, in duplexes of differing length, the position N is determined based on the 5′-end of the guide strand by counting 11 nucleotide positions in from the 5′-terminus of the guide strand and picking the corresponding base paired nucleotide in the passenger strand. Cleavage by Ago2 takes place between positions 10 and 11 as indicated by the arrow. In additional embodiments, there are two ribonucleotides, NN, at positions 10 and 11 based on the 5′-end of the guide strand by counting 10 and 11 nucleotide positions in from the 5′-terminus of the guide strand and picking the corresponding base paired nucleotides in the passenger strand.

[0102] FIGS. 5A-5J show non-limiting examples of different stabilization chemistries that can be used, for example, to stabilize the 5′ and/or 3′-ends of siNA sequences of the invention. In addition to modified and unmodified backbone chemistries indicated in the figures, these chemistries can be combined with different sugar and base nucleotide modifications as described herein.

[0103] FIG. 5A shows a non-limiting example of a stabilization chemistry which includes [3-3′]-inverted deoxyribose.

[0104] FIG. 5B shows a non-limiting example of a stabilization chemistry which includes deoxyribonucleotide.

[0105] FIG. 5C shows a non-limiting example of a stabilization chemistry which includes [5′-3′]-3′-deoxyribonucleotide.

[0106] FIG. 5D shows a non-limiting example of a stabilization chemistry which includes [5′-3′]-ribonucleotide.

[0107] FIG. 5E shows a non-limiting example of a stabilization chemistry which includes [5′-3′]-3′-O-methyl ribonucleotide.

[0108] FIG. 5F shows a non-limiting example of a stabilization chemistry which includes 3′-glyceryl.

[0109] FIG. 5G shows a non-limiting example of a stabilization chemistry which includes [3′-5′]-3′-deoxyribonucleotide.

[0110] FIG. 5H shows a non-limiting example of a stabilization chemistry which includes [3′-3′]-deoxyribonucleotide.

[0111] FIG. 5I shows a non-limiting example of a stabilization chemistry which includes [5′-2′]-deoxyribonucleotide.

[0112] FIG. 5J shows a non-limiting example of a stabilization chemistry which includes [5-3′]-dideoxyribonucleotide (when X═O).

[0113] FIG. 6 shows a non-limiting example of a strategy used to identify chemically modified siNA constructs of the invention that are nuclease resistant while preserving the ability to mediate RNAi activity. Chemical modifications are introduced into the siNA construct based on educated design parameters (e.g. introducing 2′-modifications, base modifications, backbone modifications, terminal cap modifications etc). The modified construct is tested in an appropriate system (e.g., human serum for nuclease resistance, shown, or an animal model for PK/delivery parameters). In parallel, the siNA construct is tested for RNAi activity, for example in a cell culture system such as a luciferase reporter assay and/or against endogenous mRNA). Lead siNA constructs are then identified which possess a particular characteristic while maintaining RNAi activity, and can be further modified and assayed once again. This same approach can be used to identify siNA-conjugate molecules with improved pharmacokinetic profiles, delivery, and RNAi activity.

[0114] FIG. 7 shows non-limiting examples of phosphorylated siNA molecules of the invention, including linear and duplex constructs and asymmetric derivatives thereof.

[0115] FIG. 8 shows non-limiting examples of chemically modified terminal phosphate groups of the invention.

[0116] FIG. 9 shows a non-limiting example of a cholesterol linked phosphoramidite that can be used to synthesize cholesterol conjugated siNA molecules of the invention. An example is shown with the cholesterol moiety linked to the 5′-end of the sense strand of an siNA molecule. The present invention also proves for conjugates attached at the 3′-end of the sense strand and/or 3′ end of the antisense strand or elsewhere throughout either the sense or antisense strands.

[0117] FIG. 10 depicts an embodiment of 5′ and 3′ inverted abasic caps linked to a nucleic acid strand.

[0118] FIG. 11 shows the changes in PHD2 mRNA levels in Balb/C female mice that were treated with two different siNAs (3 mg/kg dose) in LNP formulations, L-201, relative to PBS and scrambled siRNA controls.

[0119] FIG. 12A shows the changes in liver and kidney EPO mRNA in Balb/C female mice that were treated with two different siNAs (a 3 mg/kg dose) in LNP formulations, L-201, relative to PBS and scrambled siNA controls.

[0120] FIG. 12B shows the changes in serum EPO protein levels in Balb/C female mice that were treated with two different siNAs (a 3 mg/kg dose) in LNP formulations, L-201, relative to PBS and scrambled siNA controls.

[0121] FIG. 13A shows the changes in reticulocytes in Balb/C female mice after a single dose with two different siNAs in LNP formulations, L-201, relative to PBS and scrambled siNA controls.

[0122] FIG. 13B shows the changes in red blood cells in Balb/C female mice after a single dose with two different siNAs in LNP formulations, L-201, relative to PBS and scrambled siNA controls.

[0123] FIG. 14A shows the changes in hematocrit (%) in Balb/C female mice after a single dose with two different siNAs in LNP formulations, L-201, relative to PBS and scrambled siNA controls.

[0124] FIG. 14B shows the changes in hemoglobin (g/dL) in Balb/C female mice after a single dose with two different siNAs in LNP formulations, L-201, relative to PBS and scrambled siNA controls.

[0125] FIG. 15 shows the dose response curves for an siNA formulated in LNP (L-201), after administration of two doses of the siNA in Balb/C female mice, relative to PBS and scrambled siNA controls.

[0126] FIG. 16A shows dose dependent changes in EPO mRNA levels after two doses of the siNA formulated in LNP (L-201) in Balb/C female mice, relative to PBS and scrambled siNA controls.

[0127] FIG. 16B shows dose dependent changes in serum Epo protein levels after two doses of the siNA formulated in LNP (L-201) in Balb/C female mice, relative to PBS and scrambled siNA controls.

[0128] FIG. 17 shows dose dependent changes in reticulocyte levels after two doses of the siNA formulated in LNP (L-201) in Balb/C female mice.

[0129] FIG. 18A shows dose dependent changes in erythropoiesis, as measured by red blood cells, after two doses of the siNA formulated in LNP (L-201) in Balb/C female mice.

[0130] FIG. 18B shows dose dependent changes in erythropoiesis, as measured by hemoglobin levels, after two doses of the siNA formulated in LNP (L-201) in Balb/C female mice.

[0131] FIG. 18C shows dose dependent changes in erythropoiesis, as measured by hematocrit, after two doses of the siNA formulated in LNP (L-201) in Balb/C female mice.

[0132] FIG. 19A shows the temporal changes in hemotacrit in female Balb/C mice following chronic dosing with the siNA at different concentrations formulated in LNP (L-201) until day 168 when the mice were euthanized compared to an mice treated with a scrambled control siNA.

[0133] FIG. 19B shows the temporal changes in hemotacrit in female Balb/C mice following chronic dosing with the siNA at different concentrations formulated in LNP (L-201) until day 168 when the mice were euthanized compared to an mice treated with a scrambled control siNA.

### DETAILED DESCRIPTION OF THE INVENTION

### A. Terms and Definitions

[0134] The following terminology and definitions apply as used in the present application.

[0135] The term “abasic” as used herein refers to its meaning as is generally accepted in the art. The term generally refers to sugar moieties lacking a nucleobase or having a hydrogen atom (H) or other non-nucleobase chemical groups in place of a nucleobase at the 1′ position of the sugar moiety, see for example Adamic et al., U.S. Pat. No. 5,998,203. In one embodiment, an abasic moiety of the invention is a ribose, deoxyribose, or dideoxyribose sugar.

[0136] The term “acyclic nucleotide” as used herein refers to its meaning as is generally accepted in the art. The term generally refers to any nucleotide having an acyclic ribose sugar, for example where any of the ribose carbon/carbon or carbon/oxygen bonds are independently or in combination absent from the nucleotide.

[0137] The term “alkyl” as used herein refers to its meaning as is generally accepted in the art. The term generally refers to a saturated or unsaturated hydrocarbons, including straight-chain, branched-chain, alkenyl, alkynyl groups and cyclic groups, but excludes aromatic groups. Notwithstanding the foregoing, alkyl also refers to non-aromatic heterocyclic groups. Preferably, the alkyl group has 1 to 12 carbons. More preferably, it is a lower alkyl of from 1 to 7 carbons, more preferably 1 to 4 carbons. The alkyl group can be substituted or unsubstituted. When substituted, the substituted group(s) is preferably, hydroxyl, halogen, cyano, C1-C4 alkoxy, ═O, ═S, NO₂, SH, NH₂, or NR₁R₂, where R₁ and R₂ independently are H or C1-C4 alkyl.

[0138] The term “anemia” as used herein refers to its meaning as is generally accepted in the art. Anemia is pathological deficiency in the oxygen-carrying component of the blood, measured in unit volume concentrations of hemoglobin, red blood cell volume, or red blood cell number. A patient is general considered anemic when the hemoglobin (Hb) levels in the blood is <13 g Hb/dl for men and is <11 g and 12 g Hb/dl for pregnant and non-pregnant women. Examples of anemia include, but are not limited to, chronic kidney disease anemia, chemotherapy-induced anemia (e.g., anemia resulting from antiviral drug regimens for infectious diseases, such as HIV and hepatitis C virus), anemia of chronic disease, anemia associated with cancer conditions, anemia resulting from radiation treatment for cancer, anemias of chronic immune disorders such as rheumatoid arthritis, inflammatory bowel disease, and lupus, and anemias due to menstruation or of senescence or in other individuals with iron processing deficiencies such as those who are iron-replete but unable to utilize iron properly, achrestic anemia, aplastic anemia, autoimmune hemolytic anemia, aregenerative anemia, Blackfan-Diamond anemia, congenital hypoplastic anemia, congenital nonspherocytic hemolytic anemia, Cooley's anemia, drug-induced immune hemolytic anemia, Fanconi's anemia, hemolytic anemia, hereditary iron-loading anemia, hereditary sideroachrestic anemia, hereditary sideroblastic anemia, hookworm anemia, hypochromic anemia, hypoplastic anemia, iron deficiency anemia, Mediterranean anemia, magaloblastic anemia, microcrytic anemia, myelopathic anemia, normochromic anemia, normocytic anemia, pernicious anemia, polar anemia, pure red cell anemia, refractory normoblactic anemia, refractory sideroblastic anemia, sickle cell anemi, sideroachrestic anemia, sideroblactic anemia, sideropenic anemia, spur cell anemia, toxic hemolytic anemia, hemorrhagic anemia, and anemia of inflammatory disease.

[0139] The term “aryl” as used herein refers to its meaning as is generally accepted in the art. The term generally refers to an aromatic group that has at least one ring having a conjugated pi electron system and includes carbocyclic aryl, heterocyclic aryl and biaryl groups, all of which can be optionally substituted. The preferred substituent(s) of aryl groups are halogen, trihalomethyl, hydroxyl, SH, OH, cyano, C1-C4 alkoxy, C1-C4 alkyl, C2-C4 alkenyl, C2-C4 alkynyl, NH₂, and NR₁R₂ groups, where R₁ and R₂ independently are H or C1-C4 alkyl.

[0140] The term “alkylaryl” as used herein refers to its meaning as is generally accepted in the art. The term generally refers to an alkyl group (as described above) covalently joined to an aryl group (as described above). Carbocyclic aryl groups are groups wherein the ring atoms on the aromatic ring are all carbon atoms. The carbon atoms are optionally substituted. Heterocyclic aryl groups are groups having from 1 to 3 heteroatoms as ring atoms in the aromatic ring and the remainder of the ring atoms are carbon atoms. Suitable heteroatoms include oxygen, sulfur, and nitrogen, and examples of heterocyclic aryl groups having such heteroatoms include furanyl, thienyl, pyridyl, pyrrolyl, N-lower alkyl pyrrolo, pyrimidyl, pyrazinyl, imidazolyl and the like, all optionally substituted. Preferably, the alkyl group is a C1-C4 alkyl group.

[0141] The term “amide” as used herein refers to its meaning as is generally accepted in the art. The term generally refers to an —C(O)—NH—R, where R is either alkyl, aryl, alkylaryl or hydrogen.

[0142] The phrase “antisense region” as used herein refers to its meaning as is generally accepted in the art. With reference to exemplary nucleic acid molecules of the invention, the term refers to a nucleotide sequence of an siNA molecule having complementarity to a target nucleic acid sequence. In addition, the antisense region of an siNA molecule can optionally comprise a nucleic acid sequence having complementarity to a sense region of the siNA molecule. In one embodiment, the antisense region of the siNA molecule is referred to as the antisense strand or guide strand.

[0143] The phrase “asymmetric hairpin” refers to a linear siNA molecule comprising an antisense region, a loop portion that can comprise nucleotides or non-nucleotides, and a sense region that comprises fewer nucleotides than the antisense region to the extent that the sense region has enough complementary nucleotides to base pair with the antisense region and form a duplex with loop. For example, an asymmetric hairpin siNA molecule of the invention can comprise an antisense region having length sufficient to mediate RNAi in a cell or in vitro system (e.g. about 15 to about 30, or about 15, 16, 17, 18, 19, 20, 21, 22, 23, 24, 25, 26, 27, 28, 29, or 30 nucleotides) and a loop region comprising about 4 to about 12 (e.g., about 4, 5, 6, 7, 8, 9, 10, 11, or 12) nucleotides, and a sense region having about 3 to about 25 (e.g., about 3, 4, 5, 6, 7, 8, 9, 10, 11, 12, 13, 14, 15, 16, 17, 18, 19, 20, 21, 22, 23, 24, or 25) nucleotides that are complementary to the antisense region. The asymmetric hairpin siNA molecule can also comprise a 5′-terminal phosphate group that can be chemically modified. The loop portion of the asymmetric hairpin siNA molecule can comprise nucleotides, non-nucleotides, linker molecules, or conjugate molecules as described herein.

[0144] The term “biodegradable” as used herein refers to its meaning as is generally accepted in the art. The term generally refers to degradation in a biological system, for example, enzymatic degradation or chemical degradation.

[0145] The term “biodegradable linker” as used herein refers to its meaning as is generally accepted in the art. With reference to exemplary nucleic acid molecules of the invention, the term refers to a linker molecule that is designed to connect one molecule to another molecule, and which is susceptible to degradation in a biological system. The linker can be a nucleic acid or non-nucleic acid based linker. For example, a biodegradable linker can be used to attach a ligand or biologically active molecule to an siNA molecule of the invention. Alternately, a biodegradable linker can be used to connect the sense and antisense strands of an siNA molecule of the invention. The biodegradable linker is designed such that its stability can be modulated for a particular purpose, such as delivery to a particular tissue or cell type. The stability of a nucleic acid-based biodegradable linker molecule can be modulated by using various chemistries, for example combinations of ribonucleotides, deoxyribonucleotides, and chemically modified nucleotides, such as 2′-O-methyl, 2′-fluoro, 2′-amino, 2′-O-amino, 2′-C-allyl, 2′-O-allyl, and other 2′-modified or base modified nucleotides. The biodegradable nucleic acid linker molecule can be a dimer, trimer, tetramer or longer nucleic acid molecule, for example, an oligonucleotide of about 2, 3, 4, 5, 6, 7, 8, 9, 10, 11, 12, 13, 14, 15, 16, 17, 18, 19, or 20 nucleotides in length, or can comprise a single nucleotide with a phosphorus-based linkage, for example, a phosphoramidate or phosphodiester linkage. The biodegradable nucleic acid linker molecule can also comprise nucleic acid backbone, nucleic acid sugar, or nucleic acid base modifications.

[0146] The phrase “biologically active molecule” as used herein refers to its meaning as is generally accepted in the art. With reference to exemplary nucleic acid molecules of the invention, the term refers to compounds or molecules that are capable of eliciting or modifying a biological response in a system and/or are capable of modulating the pharmacokinetics and/or pharmacodynamics of other biologically active molecules. Examples of biologically active molecules, include siNA molecules alone or in combination with other molecules including, but not limited to therapeutically active molecules such as antibodies, cholesterol, hormones, antivirals, peptides, proteins, chemotherapeutics, small molecules, vitamins, co-factors, nucleosides, nucleotides, oligonucleotides, enzymatic nucleic acids, antisense nucleic acids, triplex forming oligonucleotides, polyamines, polyamides, polyethylene glycol, other polyethers, 2-5A chimeras, siNA, dsRNA, allozymes, aptamers, decoys and analogs thereof.

[0147] The phrase “biological system” as used herein refers to its meaning as is generally accepted in the art. The term generally refers to material, in a purified or unpurified form, from biological sources including, but not limited to, human or animal, wherein the system comprises the components required for RNAi activity. Thus, the phrase includes, for example, a cell, tissue, subject, or organism, or extract thereof. The term also includes reconstituted material from a biological source.

[0148] The phrase “blunt end” as used herein refers to its meaning as is generally accepted in the art. With reference to exemplary nucleic acid molecules of the invention, the term refers to termini of a double-stranded siNA molecule having no overhanging nucleotides. For example, the two strands of a double-stranded siNA molecule having blunt ends align with each other with matched base-pairs without overhanging nucleotides at the termini. A siNA duplex molecule of the invention can comprise blunt ends at one or both termini of the duplex, such as termini located at the 5′-end of the antisense strand, the 5′-end of the sense strand, or both termini of the duplex.

[0149] The term “cap” also referred to herein as “terminal cap,” as used herein refers to its meaning as is generally accepted in the art. With reference to exemplary nucleic acid molecules of the invention, the term refers to a moiety, which can be a chemically modified nucleotide or non-nucleotide that can be incorporated at one or more termini of one or more nucleic acid molecules of the invention. These terminal modifications protect the nucleic acid molecule from exonuclease degradation, and can help in delivery and/or localization within a cell. The cap can be present at the 5′-terminus (5′-cap) or at the 3′-terminal (3′-cap) or can be present on both termini of any nucleic acid molecule of the invention. A cap can be present at the 5′-end, 3-end and/or 5′ and 3′-ends of the sense strand of a nucleic acid molecule of the invention. Additionally, a cap can optionally be present at the 3′-end of the antisense strand of a nucleic acid molecule of the invention. In non-limiting examples, the 5′-cap includes, but is not limited to, LNA; glyceryl; inverted deoxy abasic residue (moiety); 4′, 5′-methylene nucleotide; 1-(beta-D-erythrofuranosyl) nucleotide, 4′-thio nucleotide; carbocyclic nucleotide; 1,5-anhydrohexitol nucleotide; L-nucleotides; alpha-nucleotides; modified base nucleotide; phosphorodithioate linkage; threo-pentofuranosyl nucleotide; acyclic 3′, 4′-seco nucleotide; acyclic 3,4-dihydroxybutyl nucleotide; acyclic 3,5-dihydroxypentyl nucleotide; 3′-3′-inverted nucleotide moiety; 3′-3′-inverted abasic moiety; 3′-2′-inverted nucleotide moiety; 3-2′-inverted abasic moiety; 1,4-butanediol phosphate; 3′-phosphoramidate; hexylphosphate; aminohexyl phosphate; 3′-phosphate; 3′-phosphorothioate; phosphorodithioate; or bridging or non-bridging methylphosphonate moiety. Non-limiting examples of the 3′-cap include, but are not limited to, LNA; glyceryl; inverted deoxy abasic residue (moiety); 4′, 5′-methylene nucleotide; 1-(beta-D-erythrofuranosyl) nucleotide; 4′-thio nucleotide; carbocyclic nucleotide; 5′-amino-alkyl phosphate; 1,3-diamino-2-propyl phosphate; 3-aminopropyl phosphate; 6-aminohexyl phosphate; 1,2-aminododecyl phosphate; hydroxypropyl phosphate; 1,5-anhydrohexitol nucleotide; L-nucleotide; alpha-nucleotide; modified base nucleotide; phosphorodithioate; threo-pentofuranosyl nucleotide; acyclic 3′, 4′-seco nucleotide; 3,4-dihydroxybutyl nucleotide; 3,5-dihydroxypentyl nucleotide, 5′-5′-inverted nucleotide moiety; 5′-5′-inverted abasic moiety; 5′-phosphoramidate; 5′-phosphorothioate; 1,4-butanediol phosphate; 5′-amino; bridging and/or non-bridging 5′-phosphoramidate; phosphorothioate and/or phosphorodithioate; bridging or non bridging methylphosphonate; and 5′-mercapto moieties (for more details see Beaucage and Iyer, 1993, Tetrahedron 49, 1925; incorporated by reference herein). FIGS. 5A-5J show some non-limiting examples of various caps.

[0150] The term “cell” as used herein refers to its meaning as is generally accepted in the art. With reference to exemplary nucleic acid molecules of the invention, the term is used in its usual biological sense, and does not refer to an entire multicellular organism, e.g., specifically does not refer to a human being. The cell can be present in an organism, e.g., birds, plants and mammals, such as humans, cows, sheep, apes, monkeys, swine, dogs, and cats. The cell can be prokaryotic (e.g., bacterial cell) or eukaryotic (e.g., mammalian or plant cell). The cell can be of somatic or germ line origin, totipotent or pluripotent, dividing or non-dividing. The cell can also be derived from or can comprise a gamete or embryo, a stem cell, or a fully differentiated cell.

[0151] The phrase “chemical modification” as used herein refers to its meaning as is generally accepted in the art. With reference to exemplary nucleic acid molecules of the invention, the term refers to any modification of the chemical structure of the nucleotides that differs from nucleotides of native siRNA or RNA in general. The term “chemical modification” encompasses the addition, substitution, or modification of native siRNA or RNA at the sugar, base, or internucleotide linkage, as described herein or as is otherwise known in the art. In certain embodiments, the term “chemical modification” can refer to certain forms of RNA that are naturally occurring in certain biological systems, for example 2′-O-methyl modifications or inosine modifications.

[0152] The term “complementarity” or “complementary” as used herein refers to its meaning as is generally accepted in the art. With reference to exemplary nucleic acid molecules of the invention, the terms generally refer to the formation or existence of hydrogen bond(s) between one nucleic acid sequence and another nucleic acid sequence by either traditional Watson-Crick or other non-traditional types of bonding as described herein. In reference to the nucleic molecules of the present invention, the binding free energy for a nucleic acid molecule with its complementary sequence is sufficient to allow the relevant function of the nucleic acid to proceed, e.g., RNAi activity. Determination of binding free energies for nucleic acid molecules is well known in the art (see, e.g., Turner et al., 1987, CSH Symp. Quant. Biol. LII pp. 123-133; Frier et al., 1986, Proc. Nat. Acad. Sci. USA 83:9373-9377; Turner et al., 1987, J. Am. Chem. Soc. 109:3783-3785). Perfect complementary means that all the contiguous residues of a nucleic acid sequence will hydrogen bond with the same number of contiguous residues in a second nucleic acid sequence. Partial complementarity can include various mismatches or non-based paired nucleotides (e.g., 1, 2, 3, 4, 5, 6, 7, 8, 9, 10 or more mismatches, non-nucleotide linkers, or non-based paired nucleotides) within the nucleic acid molecule, which can result in bulges, loops, or overhangs that result between the sense strand or sense region and the antisense strand or antisense region of the nucleic acid molecule or between the antisense strand or antisense region of the nucleic acid molecule and a corresponding target nucleic acid molecule. Such partial complementarity can be represented by a % complementarity that is determined by the number of non-base paired nucleotides, i.e., about 50%, 60%, 70%, 80%, 90% etc. depending on the total number of nucleotides involved. Such partial complementarity is permitted to the extent that the nucleic acid molecule (e.g., siNA) maintains its function, for example the ability to mediate sequence specific RNAi.

[0153] The terms “composition” or “formulation” as used herein refer to their generally accepted meaning in the art. These terms generally refer to a composition or formulation, such as in a pharmaceutically acceptable carrier or diluent, in a form suitable for administration, e.g., systemic or local administration, into a cell or subject, including, for example, a human. Suitable forms, in part, depend upon the use or the route of entry, for example oral, transdermal, inhalation, or by injection. Such forms should not prevent the composition or formulation from reaching a target cell (i.e., a cell to which the negatively charged nucleic acid is desirable for delivery). For example, compositions injected into the blood stream should be soluble. Other factors are known in the art, and include considerations such as toxicity and forms that prevent the composition or formulation from exerting its effect. As used herein, pharmaceutical formulations include formulations for human and veterinary use. Non-limiting examples of agents suitable for formulation with the nucleic acid molecules of the instant invention include: Lipid Nanoparticles (see for example Semple et al., 2010, Nat Biotechnol., February; 28(2):172-6.); P-glycoprotein inhibitors (such as Pluronic P85); biodegradable polymers, such as poly (DL-lactide-coglycolide) microspheres for sustained release delivery (Emerich, D F et al, 1999, Cell Transplant, 8, 47-58); and loaded nanoparticles, such as those made of polybutylcyanoacrylate. Other non-limiting examples of delivery strategies for the nucleic acid molecules of the instant invention include material described in Boado et al., 1998, J. Pharm. Sci., 87, 1308-1315; Tyler et al., 1999, FEBS Lett., 421, 280-284; Pardridge et al., 1995, PNAS USA., 92, 5592-5596; Boado, 1995, Adv. Drug Delivery Rev., 15, 73-107; Aldrian-Herrada et al., 1998, Nucleic Acids Res., 26, 4910-4916; and Tyler et al., 1999, PNAS USA., 96, 7053-7058. A “pharmaceutically acceptable composition” or “pharmaceutically acceptable formulation” can refer to a composition or formulation that allows for the effective distribution of the nucleic acid molecules of the instant invention to the physical location most suitable for their desired activity.

[0154] The phrase “cytotoxic/cytostatic agents” refer to compounds that cause cell death or inhibit cell proliferation primarily by interfering directly with the cell's functioning or inhibit or interfere with cell mytosis, including alkylating agents, tumor necrosis factors, intercalators, hypoxia activatable compounds, microtubule inhibitors/microtubule-stabilizing agents, inhibitors of mitotic kinesins, inhibitors of histone deacetylase, inhibitors of kinases involved in mitotic progression, antimetabolites; biological response modifiers; hormonal/anti-hormonal therapeutic agents, hematopoietic growth factors, monoclonal antibody targeted therapeutic agents, topoisomerase inhibitors, proteasome inhibitors and ubiquitin ligase inhibitors.

[0155] The term “gene” or “target gene” as used herein refers to their meaning as is generally accepted in the art. The terms generally refer a nucleic acid (e.g., DNA or RNA) sequence that comprises partial length or entire length coding sequences necessary for the production of a polypeptide. The target gene can also include the UTR or non-coding region of the nucleic acid sequence. A gene or target gene can also encode a functional RNA (fRNA) or non-coding RNA (ncRNA), such as small temporal RNA (stRNA), micro RNA (miRNA), small nuclear RNA (snRNA), short interfering RNA (siRNA), small nucleolar RNA (snRNA), ribosomal RNA (rRNA), transfer RNA (tRNA) and precursor RNAs thereof. Such non-coding RNAs can serve as target nucleic acid molecules for siNA mediated RNA interference in modulating the activity of fRNA or ncRNA involved in functional or regulatory cellular processes. Aberrant fRNA or ncRNA activity leading to disease can therefore be modulated by siNA molecules of the invention. siNA molecules targeting fRNA and ncRNA can also be used to manipulate or alter the genotype or phenotype of a subject, organism or cell, by intervening in cellular processes such as genetic imprinting, transcription, translation, or nucleic acid processing (e.g., transamination, methylation etc.). The target gene can be a gene derived from a cell, an endogenous gene, a transgene, or exogenous genes such as genes of a pathogen, for example a virus, which is present in the cell after infection thereof. The cell containing the target gene can be derived from or contained in any organism, for example a plant, animal, protozoan, virus, bacterium, or fungus. Non-limiting examples of plants include monocots, dicots, or gymnosperms. Non-limiting examples of animals include vertebrates or invertebrates. Non-limiting examples of fungi include molds or yeasts. For a review, see for example Snyder and Gerstein, 2003, Science, 300, 258-260.

[0156] The phrase “homologous sequence” as used herein refers to its meaning as is generally accepted in the art. The term generally refers a nucleotide sequence that is shared by one or more polynucleotide sequences, such as genes, gene transcripts and/or non-coding polynucleotides. For example, a homologous sequence can be a nucleotide sequence that is shared by two or more genes encoding related but different proteins, such as different members of a gene family, different protein epitopes, different protein isoforms or completely divergent genes. A homologous sequence can be a nucleotide sequence that is shared by two or more non-coding polynucleotides, such as noncoding DNA or RNA, regulatory sequences, introns, and sites of transcriptional control or regulation. Homologous sequences can also include sequence regions shared by more than one polynucleotide sequence. Homology does not need to be perfect identity (100%), as partially homologous sequences are also contemplated by and within the scope of the instant invention (e.g., at least 95%, 94%, 93%, 92%, 91%, 90%, 89%, 88%, 87%, 86%, 85%, 84%, 83%, 82%, 81%, 80% etc.). Percent homology is the number of matching nucleotides between two sequences divided by the total length being compared, multiplied by 100.

[0157] The phrase “improved RNAi activity” refers to an increase in RNAi activity measured in vitro and/or in vivo, where the RNAi activity is a reflection of both the ability of the siNA to mediate RNAi and the stability of the siNAs of the invention. In this invention, the product of these activities can be increased in vitro and/or in vivo compared to an all RNA siNA or an siNA containing a plurality of ribonucleotides. In some cases, the activity or stability of the siNA molecule can be decreased (i.e., less than ten-fold), but the overall activity of the siNA molecule is enhanced in vitro and/or in vivo.

[0158] The terms “inhibit,” “down-regulate,” or “reduce” as used herein refers to its meaning as is generally accepted in the art. With reference to exemplary nucleic acid molecules of the invention, he term generally refers the reduction in the expression of the gene, or level of RNA molecules or equivalent RNA molecules encoding one or more proteins or protein subunits, or activity of one or more proteins or protein subunits, below that observed in the absence of the nucleic acid molecules (e.g., siNA) of the invention. Down-regulation can also be associated with post-transcriptional silencing, such as, RNAi mediated cleavage or by alteration in DNA methylation patterns or DNA chromatin structure. Inhibition, down-regulation or reduction with an siNA molecule can be in reference to an inactive molecule, an attenuated molecule, an siNA molecule with a scrambled sequence, or an siNA molecule with mismatches or alternatively, it can be in reference to the system in the absence of the nucleic acid.

[0159] The terms “intermittent” or “intermittently” as used herein refers to its meaning as is generally accepted in the art. The term generally refers to periodic stopping and starting at either regular or irregular intervals.

[0160] The terms “internucleoside linkage” or “internucleoside linker” or “internucleotide linkage” or “internucleotide linker” are used herein interchangeably and refer to any linker or linkage between two nucleoside units, as is known in the art, including, for example, but not limitation, phosphate, analogs of phosphate, phosphonate, guanidium, hydroxylamine, hydroxylhydrazinyl, amide, carbamate, alkyl, and substituted alkyl linkages. The internucleoside linkages constitute the backbone of a nucleic acid molecule.

[0161] The terms “mammalian” or “mammal” as used herein refers to its meaning as is generally accepted in the art. The term generally refers to any warm blooded vertebrate species, such as a human, mouse, rat, dog, cat, hamster, guinea pig, rabbit, livestock, and the like.

[0162] The phrase “metered dose inhaler” or MDI refers to a unit comprising a can, a secured cap covering the can and a formulation metering valve situated in the cap. MDI systems includes a suitable channeling device. Suitable channeling devices comprise for example, a valve actuator and a cylindrical or cone-like passage through which medicament can be delivered from the filled canister via the metering valve to the nose or mouth of a patient such as a mouthpiece actuator.

[0163] The term “microRNA” or “miRNA” as used herein refers to its meaning as is generally accepted in the art. The term generally refers a small double-stranded RNA that regulates the expression of target messenger RNAs either by mRNA cleavage, translational repression/inhibition or heterochromatic silencing (see for example Ambros, 2004, Nature, 431, 350-355; Bartel, 2004, Cell, 116, 281-297; Cullen, 2004, Virus Research., 102, 3-9; He et al., 2004, Nat. Rev. Genet., 5, 522-531; Ying et al., 2004, Gene, 342, 25-28; and Sethupathy et al., 2006, RNA, 12:192-197).

[0164] The term “modulate” as used herein refers to its meaning as is generally accepted in the art. With reference to exemplary nucleic acid molecules of the invention, the term refers to when the expression of a gene, or level of one or more RNA molecules (coding or non-coding), or activity of one or more RNA molecules or proteins or protein subunits, is up-regulated or down-regulated, such that expression, level, or activity is greater than or less than that observed in the absence of the molecule that effects modulation. For example, the term “modulate” in some embodiments can refer to inhibition and in other embodiments can refer to potentiation or up-regulation, e.g., of gene expression.

[0165] The phrase “modified nucleotide” as used herein refers to its meaning as is generally accepted in the art. The term generally refers a nucleotide, which contains a modification in the chemical structure of the base, sugar and/or phosphate of the unmodified (or natural) nucleotide as is generally known in the art. Non-limiting examples of modified nucleotides are described herein and in U.S. application Ser. No. 12/064,014.

[0166] The phrase “non-base paired” refers to nucleotides that are not base paired between the sense strand or sense region and the antisense strand or antisense region of an double-stranded siNA molecule; and can include for example, but not limitation, mismatches, overhangs, single stranded loops, etc.

[0167] The term “non-nucleotide” refers to any group or compound which can be incorporated into a nucleic acid chain in the place of one or more nucleotide units, such as for example but not limitation abasic moieties or alkyl chains. The group or compound is “abasic” in that it does not contain a commonly recognized nucleotide base, such as adenosine, guanine, cytosine, uracil or thymine and therefore lacks a nucleobase at the 1′-position.

[0168] The term “nucleotide” is used as is generally recognized in the art. Nucleotides generally comprise a nucleobase, a sugar, and an internucleoside linkage, e.g., a phosphate. The base can be a natural bases (standard), modified bases, or a base analog, as are well known in the art. Such bases are generally located at the 1′ position of a nucleotide sugar moiety. Additionally, the nucleotides can be unmodified or modified at the sugar, internucleoside linkage, and/or base moiety, (also referred to interchangeably as nucleotide analogs, modified nucleotides, non-natural nucleotides, non-standard nucleotides and others; see, for example, U.S. application Ser. No. 12/064,014.

[0169] The term “overhang” as used herein refers to its meaning as is generally accepted in the art. With reference to exemplary double stranded nucleic acid molecules, the term generally refers to the terminal portion of a nucleotide sequence that is not base paired between the two strands of a double-stranded nucleic acid molecule (see for example, FIGS. 4A-4C). Overhangs, when present, are typically at the 3′-end of one or both strands in a siNA duplex.

[0170] The term “parenteral” as used herein refers to its meaning as is generally accepted in the art. The term generally refers methods or techniques of administering a molecule, drug, agent, or compound in a manner other than through the digestive tract, and includes epicutaneous, subcutaneous, intravascular (e.g., intravenous), intramuscular, or intrathecal injection or infusion techniques and the like.

[0171] The phrase “pathway target” refers to any target involved in pathways of gene expression or activity. For example, any given target can have related pathway targets that can include upstream, downstream, or modifier genes in a biologic pathway. These pathway target genes can provide additive or synergistic effects in the treatment of diseases, conditions, and traits herein.

[0172] The term “PHD2” refers to prolyl hydroxylase domain 2, which is the gene that encodes PHD2 proteins, PHD2 peptides, PHD2 polypeptides, PHD2 regulatory polynucleotides (e.g., PHD2 miRNAs and siNAs), mutant PHD2 genes, and splice variants of a PHD2 genes, as well as other genes involved in PHD2 pathways of gene expression and/or activity. Thus, each of the embodiments described herein with reference to the term “PHD2” are applicable to all of the protein, peptide, polypeptide, and/or polynucleotide molecules covered by the term “PHD2”, as that term is defined herein. Comprehensively, such gene targets are also referred to herein generally as “target” sequences (including the target sequences listed in Table 1a).

[0173] The term “phosphorothioate” refers to an internucleotide phosphate linkage comprising one or more sulfur atoms in place of an oxygen atom. Hence, the term phosphorothioate refers to both phosphorothioate and phosphorodithioate internucleotide linkages.

[0174] The term “ribonucleotide” as used herein refers to its meaning as is generally accepted in the art. The term generally refers to a nucleotide with a hydroxyl group at the 2′ position of a β-D-ribofuranose moiety.

[0175] The term “RNA” as used herein refers to its generally accepted meaning in the art. Generally, the term RNA refers to a molecule comprising at least one ribofuranoside moiety. The term can include double-stranded RNA, single-stranded RNA, isolated RNA such as partially purified RNA, essentially pure RNA, synthetic RNA, recombinantly produced RNA, as well as altered RNA that differs from naturally occurring RNA by the addition, deletion, substitution and/or alteration of one or more nucleotides. Such alterations can include addition of non-nucleotide material, such as to the end(s) of the siNA or internally, for example at one or more nucleotides of the RNA. Nucleotides in the RNA molecules of the instant invention can also comprise non-standard nucleotides, such as non-naturally occurring nucleotides or chemically synthesized nucleotides or deoxynucleotides. These altered RNAs can be referred to as analogs or analogs of naturally-occurring RNA.

[0176] The phrase “RNA interference” or term “RNAi” refer to the biological process of inhibiting or down regulating gene expression in a cell, as is generally known in the art, and which is mediated by short interfering nucleic acid molecules, see for example Zamore and Haley, 2005, Science, 309, 1519-1524; Vaughn and Martienssen, 2005, Science, 309, 1525-1526; Zamore et al., 2000, Cell, 101, 25-33; Bass, 2001, Nature, 411, 428-429; Elbashir et al., 2001, Nature, 411, 494-498; and Kreutzer et al., International PCT Publication No. WO 00/44895; Zernicka-Goetz et al., International PCT Publication No. WO 01/36646; Fire, International PCT Publication No. WO 99/32619; Plaetinck et al., International PCT Publication No. WO 00/01846; Mello and Fire, International PCT Publication No. WO 01/29058; Deschamps-Depaillette, International PCT Publication No. WO 99/07409; and Li et al., International PCT Publication No. WO 00/44914; Allshire, 2002, Science, 297, 1818-1819; Volpe et al., 2002, Science, 297, 1833-1837; Jenuwein, 2002, Science, 297, 2215-2218; and Hall et al., 2002, Science, 297, 2232-2237; Hutvagner and Zamore, 2002, Science, 297, 2056-60; McManus et al., 2002, RNA, 8, 842-850; Reinhart et al., 2002, Gene & Dev., 16, 1616-1626; and Reinhart & Bartel, 2002, Science, 297, 1831). Additionally, the term RNAi is meant to be equivalent to other terms used to describe sequence specific RNA interference, such as post transcriptional gene silencing, translational inhibition, transcriptional inhibition, or epigenetics. For example, siNA molecules of the invention can be used to epigenetically silence genes at either the post-transcriptional level or the pre-transcriptional level. In a non-limiting example, epigenetic modulation of gene expression by siNA molecules of the invention can result from siNA mediated modification of chromatin structure or methylation patterns to alter gene expression (see, for example, Verdel et al., 2004, Science, 303, 672-676; Pal-Bhadra et al., 2004, Science, 303, 669-672; Allshire, 2002, Science, 297, 1818-1819; Volpe et al., 2002, Science, 297, 1833-1837; Jenuwein, 2002, Science, 297, 2215-2218; and Hall et al., 2002, Science, 297, 2232-2237). In another non-limiting example, modulation of gene expression by siNA molecules of the invention can result from siNA mediated cleavage of RNA (either coding or non-coding RNA) via RISC, or via translational inhibition, as is known in the art or modulation can result from transcriptional inhibition (see for example Janowski et al., 2005, Nature Chemical Biology, 1, 216-222).

[0177] The phrase “RNAi inhibitor” refers to any molecule that can down regulate, reduce or inhibit RNA interference function or activity in a cell or organism. An RNAi inhibitor can down regulate, reduce or inhibit RNAi (e.g., RNAi mediated cleavage of a target polynucleotide, translational inhibition, or transcriptional silencing) by interaction with or interfering with the function of any component of the RNAi pathway, including protein components such as RISC, or nucleic acid components such as miRNAs or siRNAs. A RNAi inhibitor can be an siNA molecule, an antisense molecule, an aptamer, or a small molecule that interacts with or interferes with the function of RISC, a miRNA, or an siRNA or any other component of the RNAi pathway in a cell or organism. By inhibiting RNAi (e.g., RNAi mediated cleavage of a target polynucleotide, translational inhibition, or transcriptional silencing), a RNAi inhibitor of the invention can be used to modulate (e.g., up-regulate or down regulate) the expression of a target gene.

[0178] The phrase “sense region” as used herein refers to its meaning as is generally accepted in the art. With reference to exemplary nucleic acid molecules of the invention, the term refers to a nucleotide sequence of an siNA molecule having complementarity to an antisense region of the siNA molecule. In addition, the sense region of an siNA molecule can comprise a nucleic acid sequence having homology or sequence identity with a target nucleic acid sequence. In one embodiment, the sense region of the siNA molecule is also referred to as the sense strand or passenger strand.

[0179] The phrases “short interfering nucleic acid”, “siNA”, “short interfering RNA”, “siRNA”, “short interfering nucleic acid molecule”, “short interfering oligonucleotide molecule”, or “chemically modified short interfering nucleic acid molecule” refer to any nucleic acid molecule capable of inhibiting or down regulating gene expression or viral replication by mediating RNA interference (“RNAi”) or gene silencing in a sequence-specific manner. These terms can refer to both individual nucleic acid molecules, a plurality of such nucleic acid molecules, or pools of such nucleic acid molecules. The siNA can be a double-stranded nucleic acid molecule comprising self-complementary sense and antisense strands, wherein the antisense strand comprises a nucleotide sequence that is complementary to a nucleotide sequence in a target nucleic acid molecule or a portion thereof and the sense strand comprises a nucleotide sequence corresponding to the target nucleic acid sequence or a portion thereof. The siNA can be a polynucleotide with a duplex, asymmetric duplex, hairpin or asymmetric hairpin secondary structure, having self-complementary sense and antisense regions, wherein the antisense region comprises a nucleotide sequence that is complementary to a nucleotide sequence in a separate target nucleic acid molecule or a portion thereof and the sense region comprises a nucleotide sequence corresponding to the target nucleic acid sequence or a portion thereof. The siNA can be a circular single-stranded polynucleotide having two or more loop structures and a stem comprising self-complementary sense and antisense regions, wherein the antisense region comprises nucleotide sequence that is complementary to a nucleotide sequence in a target nucleic acid molecule or a portion thereof and the sense region comprises a nucleotide sequence corresponding to the target nucleic acid sequence or a portion thereof, and wherein the circular polynucleotide can be processed either in vivo or in vitro to generate an active siNA molecule capable of mediating RNAi. The siNA can also comprise a single-stranded polynucleotide having a nucleotide sequence complementary to nucleotide sequence in a target nucleic acid molecule or a portion thereof (for example, where such siNA molecule does not require the presence within the siNA molecule of a nucleotide sequence corresponding to the target nucleic acid sequence or a portion thereof), wherein the single-stranded polynucleotide can further comprise a terminal phosphate group, such as a 5′-phosphate (see for example, Martinez et al., 2002, Cell, 110, 563-574 and Schwarz et al., 2002, Molecular Cell, 10, 537-568), or 5′, 3′-diphosphate.

[0180] The term “subject” as used herein refers to its meaning as is generally accepted in the art. The term generally refers an organism to which the nucleic acid molecules of the invention can be administered. A subject can be a mammal or mammalian cells, including a human or human cells. The term also refers to an organism, which is a donor or recipient of explanted cells or the cells themselves.

[0181] The phrase “systemic administration” as used herein refers to its meaning as is generally accepted in the art. The term generally refers in vivo systemic absorption or accumulation of drugs in the blood stream followed by distribution throughout the entire body.

[0182] The term “target” as it refers to PHD2 refers to any PHD2 target protein, peptide, or polypeptide, such as encoded by Genbank Accession Nos. shown in Table 7. The term also refers to nucleic acid sequences or target polynucleotide sequence encoding any target protein, peptide, or polypeptide, such as proteins, peptides, or polypeptides encoded by sequences having Genbank Accession Nos. shown in Table 7. The target of interest can include target polynucleotide sequences, such as target DNA or target RNA. The term “target” is also meant to include other sequences, such as differing isoforms, mutant target genes, splice variants of target polynucleotides, target polymorphisms, and non-coding (e.g., ncRNA, miRNA, stRNA, sRNA) or other regulatory polynucleotide sequences as described herein.

[0183] The phrase “target site” as used herein refers to its meaning as is generally accepted in the art. The term generally refers to a sequence within a target nucleic acid molecule, (e.g., RNA) that is “targeted”, e.g., for cleavage mediated by an siNA construct, which contains sequences within its antisense region that are complementary to the target sequence.

[0184] The phrase “therapeutically effective amount” as used herein refers to its meaning as is generally accepted in the art. The term generally refers to the amount of the compound or composition that will elicit the biological or medical response of a cell, tissue, system, animal or human that is be sought by the researcher, veterinarian, medical doctor or other clinician. For example, if a given clinical treatment is considered effective when there is at least a 25% reduction in a measurable parameter associated with a disease or disorder, a therapeutically effective amount of a drug for the treatment of that disease or disorder is that amount necessary to effect at least a 25% reduction in that parameter.

[0185] The phrase “universal base” as used herein refers to its meaning as is generally accepted in the art. The term universal base generally refers to nucleotide base analogs that form base pairs with each of the natural DNA/RNA bases with little or no discrimination between them. Non-limiting examples of universal bases include C-phenyl, C-naphthyl and other aromatic derivatives, inosine, azole carboxamides, and nitroazole derivatives such as 3-nitropyrrole, 4-nitroindole, 5-nitroindole, and 6-nitroindole as known in the art (see for example, Loakes, 2001, Nucleic Acids Research, 29, 2437-2447).

[0186] The term “up-regulate” as used herein refers to its meaning as is generally accepted in the art. With reference to exemplary nucleic acid molecules of the invention, the term refers to an increase in the expression of a gene, or level of RNA molecules or equivalent RNA molecules encoding one or more proteins or protein subunits, or activity of one or more RNAs, proteins or protein subunits, above that observed in the absence of the nucleic acid molecules (e.g., siNA) of the invention. In certain instances, up-regulation or promotion of gene expression with an siNA molecule is above that level observed in the presence of an inactive or attenuated molecule. In other instances, up-regulation or promotion of gene expression with siNA molecules is above that level observed in the presence of, for example, an siNA molecule with scrambled sequence or with mismatches. In still other instances, up-regulation or promotion of gene expression with a nucleic acid molecule of the instant invention is greater in the presence of the nucleic acid molecule than in its absence. In some instances, up-regulation or promotion of gene expression is associated with inhibition of RNA mediated gene silencing, such as RNAi mediated cleavage or silencing of a coding or non-coding RNA target that down regulates, inhibits, or silences the expression of the gene of interest to be up-regulated. The down regulation of gene expression can, for example, be induced by a coding RNA or its encoded protein, such as through negative feedback or antagonistic effects. The down regulation of gene expression can, for example, be induced by a non-coding RNA having regulatory control over a gene of interest, for example by silencing expression of the gene via translational inhibition, chromatin structure, methylation, RISC mediated RNA cleavage, or translational inhibition. As such, inhibition or down regulation of targets that down regulate, suppress, or silence a gene of interest can be used to up-regulate expression of the gene of interest toward therapeutic use.

[0187] The term “vector” as used herein refers to its meaning as is generally accepted in the art. The term vector generally refers to any nucleic acid- and/or viral-based expression system or technique used to deliver one or more nucleic acid molecules.

### B. siNA Molecules of the Invention

[0188] The present invention provides compositions and methods comprising siNAs targeted to PHD2 that can be used to treat diseases, e.g., anemia, associated with PHD2 expression. In particular aspects and embodiments of the invention, the nucleic acid molecules of the invention comprise at least a 15 nucleotide sequence of the sequences shown in Table 1a and Table 1b. The siNAs can be provided in several forms. For example, the siNA can be isolated as one or more siNA compounds, or it may be in the form of a transcriptional cassette in a DNA plasmid. The siNA may also be chemically synthesized and can include modifications as shown, for example, but not limitation, in Table 1c and Table 8 Thus, in various embodiments, at least one strand or region of the nucleic acids of the invention comprises at least a 15 nucleotide sequence selected from the group of sequences consisting of SEQ ID NOS:1-1048. The siNAs can be administered alone or co-administered with other siNA molecules or with conventional agents that treat a PHD2 related disease or condition.

[0189] The siNA molecules of the invention can be used to mediate gene silencing, specifically PHD2, via interaction with RNA transcripts or alternately by interaction with particular gene sequences, wherein such interaction results in modulation of gene silencing either at the transcriptional level or post-transcriptional level such as, for example, but not limited to, RNAi or through cellular processes that modulate the chromatin structure or methylation patterns of the target and prevent transcription of the target gene, with the nucleotide sequence of the target thereby mediating silencing. More specifically, the target is any of PHD2 RNA, DNA, or mRNA,

[0190] In one aspect, the invention provides short interfering nucleic acid (siNA) molecules for inhibiting the expression of the PHD2 gene in a cell or mammal. The siNA can be single-stranded or double-stranded. When double-stranded, the siNA comprising a sense and an antisense stand. The antisense strand is complementary to at least a part of an mRNA formed in the expression of the PHD2 gene. The sense strand comprises a region that is complementary to the antisense strand. In specific embodiments, the antisense strand comprises at least a 15 nucleotide sequence of an antisense sequence listed in Table 1b. Generally, the double-stranded siNA comprises at least a 15 nucleotide sequence of the sense strand in Table 1b and at least a 15 nucleotide sequence of the antisense strand in Table 1b. One or more of the nucleotides of the siNAs of the invention are optionally modified. In further embodiments having modifications, some siNAs of the invention comprises at least one nucleotide sequence selected from the groups of sequences provide in Table 1c. In other embodiments, the siNA comprises at least two sequences selected from the group of sequences provided in Table 1c, wherein one of the at least two sequences is complementary to another of the at least two sequences and one of the at least two sequences is complementary to a sequence of a mRNA generated in the expression of the PHD2 gene. Examples of certain modified siNAs of the invention are in Table 1c.

[0191] The double stranded RNA molecules of the invention can comprise two distinct and separate strands that can be symmetric or asymmetric and are complementary, i.e., two single-stranded RNA molecules, or can comprise one single-stranded molecule in which two complementary portions, e.g., a sense region and an antisense region, are base-paired, and are covalently linked by one or more single-stranded “hairpin” areas (i.e. loops) resulting in, for example, a single-stranded short-hairpin polynucleotide or a circular single-stranded polynucleotide.

[0192] The linker can be polynucleotide linker or a non-nucleotide linker. In some embodiments, the linker is a non-nucleotide linker. In some embodiments, a hairpin or circular siNA molecule of the invention contains one or more loop motifs, wherein at least one of the loop portions of the siNA molecule is biodegradable. For example, a single-stranded hairpin siNA molecule of the invention is designed such that degradation of the loop portion of the siNA molecule in vivo can generate a double-stranded siNA molecule with 3-terminal overhangs, such as 3-terminal nucleotide overhangs comprising 1, 2, 3 or 4 nucleotides. Or alternatively, a circular siNA molecule of the invention is designed such that degradation of the loop portions of the siNA molecule in vivo can generate a double-stranded siNA molecule with 3′-terminal overhangs, such as 3-terminal nucleotide overhangs comprising about 2 nucleotides.

[0193] In symmetric siNA molecules of the invention, each strand, the sense (passenger) strand and antisense (guide) strand, are independently about 15 to about 30 (e.g., about 15, 16, 17, 18, 19, 20, 21, 22, 23, 24, 25, 26, 27, 28, 29, or 30) nucleotides in length. Generally, each strand of the symmetric siNA molecules of the invention are about 19-24 (e.g., about 19, 20, 21, 22, 23 or 24) nucleotides in length.

[0194] In asymmetric siNA molecules, the antisense region or strand of the molecule is about 15 to about 30 (e.g., about 15, 16, 17, 18, 19, 20, 21, 22, 23, 24, 25, 26, 27, 28, 29, or 30) nucleotides in length, wherein the sense region is about 3 to about 25 (e.g., about 3, 4, 5, 6, 7, 8, 9, 10, 11, 12, 13, 14, 15, 16, 17, 18, 19, 20, 21, 22, 23, 24, or 25) nucleotides in length. Generally, each strand of the asymmetric siNA molecules of the invention is about 19-24 (e.g., about 19, 20, 21, 22, 23 or 24) nucleotides in length.

[0195] In yet other embodiments, siNA molecules of the invention comprise single stranded hairpin siNA molecules, wherein the siNA molecules are about 25 to about 70 (e.g., about 25, 26, 27, 28, 29, 30, 31, 32, 33, 34, 35, 36, 40, 45, 50, 55, 60, 65, or 70) nucleotides in length.

[0196] In still other embodiments, siNA molecules of the invention comprise single-stranded circular siNA molecules, wherein the siNA molecules are about 38 to about 70 (e.g., about 38, 40, 45, 50, 55, 60, 65, or 70) nucleotides in length.

[0197] In still other embodiments, siNA molecules of the invention comprise single-stranded non-circular siNA molecules, wherein the siNA molecules are independently about 15 to about 30 (e.g., about 15, 16, 17, 18, 19, 20, 21, 22, 23, 24, 25, 26, 27, 28, 29, or 30) nucleotides in length.

[0198] In various symmetric embodiments, the siNA duplexes of the invention independently comprise about 15 to about 30 (e.g., about 15, 16, 17, 18, 19, 20, 21, 22, 23, 24, 25, 26, 27, 28, 29, or 30) base pairs. Generally, the duplex structure of siNAs of the invention is between 15 and 30, more generally between 18 and 25, yet more generally between 19 and 24, and most generally between 19 and 21 base pairs in length.

[0199] In yet other embodiments, where the duplex siNA molecules of the invention are asymmetric, the siNA molecules comprise about 3 to 25 (e.g., about 3, 4, 5, 6, 7, 8, 9, 10, 11, 12, 13, 14, 15, 16, 17, 18, 19, 20, 21, 22, 23, 24, or 25) base pairs. Generally, the duplex structure of siNAs of the invention is between 15 and 25, more generally between 18 and 25, yet more generally between 19 and 24, and most generally between 19 and 21 base pairs in length.

[0200] In still other embodiments, where the siNA molecules of the invention are hairpin or circular structures, the siNA molecules comprise about 15 to about 30 (e.g., about 15, 16, 17, 18, 19, 20, 21, 22, 23, 24, 25, 26, 27, 28, 29, or 30) base pairs.

[0201] The sense strand and antisense strand, or the sense region and antisense region, of the siNA molecules of the invention can be complementary. Also, the antisense strand or antisense region can be complementary to a nucleotide sequence or a portion thereof of the PHD2 target RNA. The sense strand or sense region of the siNA can comprise a nucleotide sequence of a PHD2 gene or a portion thereof. In certain embodiments, the sense region or sense strand of an siNA molecule of the invention is complementary to that portion of the antisense region or antisense strand of the siNA molecule that is complementary to a PHD2 target polynucleotide sequence, such as for example, but not limited to, those sequences represented by GENBANK Accession Nos. shown in Table 7.

[0202] In some embodiments, siNA molecules of the invention have perfect complementarity between the sense strand or sense region and the antisense strand or antisense region of the siNA molecule. In other or the same embodiments, the antisense strand of the siNA molecules of the invention are perfectly complementary to a corresponding target nucleic acid molecule.

[0203] In yet other embodiments, siNA molecules of the invention have partial complementarity (i.e., less than 100% complementarity) between the sense strand or sense region and the antisense strand or antisense region of the siNA molecule or between the antisense strand or antisense region of the siNA molecule and a corresponding target nucleic acid molecule. Thus, in some embodiments, the double-stranded nucleic acid molecules of the invention, have between about 15 to about 30 (e.g., about 15, 16, 17, 18, 19, 20, 21, 22, 23, 24, 25, 26, 27, 28, 29, or 30) nucleotides in one strand that are complementary to the nucleotides of the other strand. In other embodiments, the molecules have between about 15 to about 30 (e.g., about 15, 16, 17, 18, 19, 20, 21, 22, 23, 24, 25, 26, 27, 28, 29, or 30) nucleotides in the sense region that are complementary to the nucleotides of the antisense region. of the double-stranded nucleic acid molecule. In certain embodiments, the double-stranded nucleic acid molecules of the invention have between about 15 to about 30 (e.g., about 15, 16, 17, 18, 19, 20, 21, 22, 23, 24, 25, 26, 27, 28, 29, or 30) nucleotides in the antisense strand that are complementary to a nucleotide sequence of its corresponding target nucleic acid molecule.

[0204] In other embodiments, the siNA molecule can contain one or more nucleotide deletions, substitutions, mismatches and/or additions; provided, however, that the siNA molecule maintains its activity, for example, to mediate RNAi. In a non-limiting example, the deletion, substitution, mismatch and/or addition can result in a loop or bulge, or alternately a wobble or other alternative (non Watson-Crick) base pair. Thus, in some embodiments, for example, the double-stranded nucleic acid molecules of the invention, have 1 or more (e.g., 1, 2, 3, 4, 5, or 6) nucleotides, in one strand or region that are mismatches or non-base-paired with the other strand or region. In other embodiments, the double-stranded nucleic acid molecules of the invention, have 1 or more (e.g., 1, 2, 3, 4, 5, or 6) nucleotides in each strand or region that are mismatches or non-base-paired with the other strand or region. In a preferred embodiment, the siNA of the invention contains no more than 3 mismatches. If the antisense strand of the siNA contains mismatches to a target sequence, it is preferable that the area of mismatch not be located in the center of the region of complementarity.

[0205] In other embodiments, the siNA molecule can contain one or more nucleotide deletions, substitutions, mismatches and/or additions to a sequence in Table 1b provided, however, that the siNA molecule maintains its activity, for example, to mediate RNAi. In a non-limiting example, the deletion, substitution, mismatch and/or addition can result in a loop or bulge, or alternately a wobble or other alternative (non Watson-Crick) base pair.

[0206] The invention also comprises double-stranded nucleic acid (siNA) molecules as otherwise described hereinabove in which the first strand and second strand are complementary to each other and wherein at least one strand is hybridisable to the polynucleotide sequence of a sequence in Table 1b under conditions of high stringency, and wherein any of the nucleotides is unmodified or chemically modified.

[0207] Hybridization techniques are well known to the skilled artisan (see for instance, Sambrook et al., Molecular Cloning: A Laboratory Manual, 2nd Ed., Cold Spring Harbor Laboratory Press, Cold Spring Harbor, N.Y. (1989)). Preferred stringent hybridization conditions include overnight incubation at 42° C. in a solution comprising: 50% formamide, 5×SSC (150 mM NaCl, 15 mM trisodium citrate), 50 mM sodium phosphate (pH 7.6), 5×Denhardt's solution, 10% dextran sulfate, and 20 microgram/ml denatured, sheared salmon sperm DNA; followed by washing the filters in 0.1×SSC at about 65° C.

[0208] In one specific embodiment, the first strand has about 15, 16, 17, 18, 19, 20 or 21 nucleotides that are complementary to the nucleotides of the other strand and at least one strand is hybridisable to a polynucleotide sequence in Table 1b. In a more preferred embodiment, the first strand has about 15, 16, 17, 18, 19, 20 or 21 nucleotides that are complementary to the nucleotides of the other strand and at least one strand is hybridisable to SEQ ID NO: 1, SEQ ID NO: 880, SEQ ID NO: 2, SEQ ID NO: 881, SEQ ID NO: 3, SEQ ID NO: 882, SEQ ID NO: 4, SEQ ID NO: 883, SEQ ID NO: 5, SEQ ID NO: 884, SEQ ID NO: 6, SEQ ID NO: 885, SEQ ID NO: 7, SEQ ID NO: 886, SEQ ID NO: 8, SEQ ID NO: 887, SEQ ID NO: 9, SEQ ID NO: 888, SEQ ID NO: 10, SEQ ID NO: 889, SEQ ID NO: 11, SEQ ID NO: 890, SEQ ID NO: 13, SEQ ID NO: 892, SEQ ID NO: 25, SEQ ID NO: 904, SEQ ID NO: 33, SEQ ID NO: 912, SEQ ID NO: 46, SEQ ID NO: 925, SEQ ID NO: 52, SEQ ID NO: 931, SEQ ID NO: 54, SEQ ID NO: 933, SEQ ID NO: 79, or SEQ ID NO: 958; under conditions of high stringency, and wherein any of the nucleotides is unmodified or chemically modified.

[0209] In certain embodiments, the siNA molecules of the invention comprise overhangs of about 1 to about 4 (e.g., about 1, 2, 3 or 4) nucleotides. The nucleotides in the overhangs can be the same or different nucleotides. In some embodiments, the overhangs occur at the 3′-end at one or both strands of the double-stranded nucleic acid molecule. For example, a double-stranded nucleic acid molecule of the invention can comprise a nucleotide or non-nucleotide overhang at the 3′-end of the antisense strand/region, the 3′-end of the sense strand/region, or both the antisense strand/region and the sense strand/region of the double-stranded nucleic acid molecule.

[0210] In some embodiments, the nucleotides comprising the overhang portion of an siNA molecule of the invention comprise sequences based on the PHD2 target polynucleotide sequence in which nucleotides comprising the overhang portion of the antisense strand/region of an siNA molecule of the invention can be complementary to nucleotides in the PHD2 target polynucleotide sequence and/or nucleotides comprising the overhang portion of the sense strand/region of an siNA molecule of the invention can comprise the nucleotides in the PHD2 target polynucleotide sequence. Thus, in some embodiments, the overhang comprises a two nucleotide overhang that is complementary to a portion of the PHD2 target polynucleotide sequence. In other embodiments, however, the overhang comprises a two nucleotide overhang that is not complementary to a portion of the PHD2 target polynucleotide sequence. In certain embodiments, the overhang comprises a 3′-UU overhang that is not complementary to a portion of the PHD2 target polynucleotide sequence. In other embodiments, the overhang comprises a UU overhang at the 3′ end of the antisense strand and a TT overhang at the 3′ end of the sense strand. In other embodiments, the overhang comprises nucleotides as described in the examples, Tables, and Figures herein.

[0211] In any of the embodiments of the siNA molecules described herein having 3′-terminal nucleotide overhangs, the overhangs are optionally chemically modified at one or more nucleic acid sugar, base, or backbone positions. Representative, but not limiting examples of modified nucleotides in the overhang portion of a double-stranded nucleic acid (siNA) molecule of the invention include: 2′-O-alkyl (e.g., 2′-O-methyl), 2′-deoxy, 2′-deoxy-2′-fluoro, 2′-deoxy-2′-fluoroarabino (FANA), 4′-thio, 2′-O-trifluoromethyl, 2′-O-ethyl-trifluoromethoxy, 2′-O-difluoromethoxy-ethoxy, universal base, acyclic, or 5-C-methyl nucleotides. In more preferred embodiments, the overhang nucleotides are each independently, a 2′-O-alkyl nucleotide, a 2′-O-methyl nucleotide, a 2′-dexoy-2-fluoro nucleotide, or a 2′-deoxy ribonucleotide. In some instances the overhang nucleotides are linked by a one or more phosphorothioate linkages.

[0212] In yet other embodiments, siNA molecules of the invention comprise duplex nucleic acid molecules with blunt ends (i.e., without nucleotide overhangs), where both ends are blunt, or alternatively, where one of the ends is blunt. In some embodiments, the siNA molecules of the invention can comprises one blunt end, for example wherein the 5′-end of the antisense strand and the 3′-end of the sense strand do not have any overhanging nucleotides. In another example, the siNA molecule comprises one blunt end, for example wherein the 3′-end of the antisense strand and the 5′-end of the sense strand do not have any overhanging nucleotides. In other embodiments, siNA molecules of the invention comprise two blunt ends, for example wherein the 3′-end of the antisense strand and the 5′-end of the sense strand as well as the 5′-end of the antisense strand and 3′-end of the sense strand do not have any overhanging nucleotides.

[0213] In any of the embodiments or aspects of the siNA molecules of the invention, the sense strand and/or the antisense strand can further have a cap, such as described herein or as known in the art, at the 3′-end, the 5′-end, or both of the 3′ and 5′-ends of the sense strand and/or antisense strand. Or as in the case of a hairpin siNA molecule, the cap can be at either one or both of the terminal nucleotides of the polynucleotide. In some embodiments, the cap is at one of both of the ends of the sense strand of a double-stranded siNA molecule. In other embodiments, the cap is at the 3′-end of antisense (guide) strand. In preferred embodiments, the caps are at the 3′-end of the sense strand and the 5′-end of the sense strand.

[0214] Representative, but non-limiting examples of such terminal caps include an inverted abasic nucleotide, an inverted deoxy abasic nucleotide, an inverted nucleotide moiety, a group shown in FIGS. 5A-5J, a glyceryl modification, an alkyl or cycloalkyl group, a heterocycle, or any other cap as is generally known in the art.

[0215] Any of the embodiments of the siNA molecules of the invention can have a 5′ phosphate termini. In some embodiments, the siNA molecules lack terminal phosphates.

[0216] Any siNA molecule or construct of the invention can comprise one or more chemical modifications. Modifications can be used to improve in vitro or in vivo characteristics such as stability, activity, toxicity, immune response (e.g., prevent stimulation of an interferon response, an inflammatory or pro-inflammatory cytokine response, or a Toll-like Receptor (TlF) response), and/or bioavailability.

[0217] Applicants describe herein chemically modified siNA molecules with improved RNAi activity and/or stability compared to corresponding unmodified siNA molecules. Various chemically modified siNA motifs disclosed herein provide the capacity to maintain RNAi activity that is substantially similar to unmodified or minimally modified active siRNA (see for example Elbashir et al., 2001, EMBO J., 20:6877-6888) while at the same time providing nuclease resistance and pharmacokinetic properties suitable for use in therapeutic applications.

[0218] In various embodiments, the siNA molecules of the invention comprise modifications wherein any (e.g., one or more or all) nucleotides present in the sense and/or antisense strand are modified nucleotides (e.g., wherein one nucleotide is modified, some nucleotides (i.e., plurality or more than one) are modified, or all nucleotides are modified nucleotides. In some embodiments, the siNA molecules of the invention are partially modified (e.g., about 1, 2, 3, 4, 5, 6, 7, 8, 9, 10, 11, 12, 13, 14, 15, 16, 17, 18, 19, 20, 21, 22, 23, 24, 25, 26, 27, 28, 29, 30, 31, 32, 33, 34, 35, 36, 37, 38, 39, 40, 41, 42, 43, 44, 45, 46, 47, 48, 49, 50, 55, or 59 nucleotides are modified) with chemical modifications. In some embodiments, an siNA molecule of the invention comprises at least about 8, 10, 12, 14, 16, 18, 20, 22, 24, 26, 28, 30, 32, 34, 36, 38, 40, 42, 44, 46, 48, 50, 52, 54, 56, 58, or 60 nucleotides that are modified nucleotides. In other embodiments, the siNA molecules of the invention are completely modified (e.g., 100% modified) with chemical modifications, i.e., the siNA molecule does not contain any ribonucleotides. In some of embodiments, one or more of the nucleotides in the sense strand of the siNA molecules of the invention are modified. In the same or other embodiments, one or more of the nucleotides in the antisense strand of the siNA molecules of the invention are modified.

[0219] The chemical modification within a single siNA molecule can be the same or different. In some embodiments, at least one strand has at least one chemical modification. In other embodiments, each strand has at least one chemical modifications, which can be the same or different, such as, sugar, base, or backbone (i.e., internucleotide linkage) modifications. In other embodiments, siNA molecules of the invention contain at least 2, 3, 4, 5, or more different chemical modifications.

[0220] Non-limiting examples of chemical modifications that are suitable for use in the present invention, are disclosed in U.S. patent application Ser. Nos. 10/444,853; 10/981,966; 12/064,014 and in references cited therein and include sugar, base, and phosphate, non-nucleotide modifications, and/or any combination thereof. These U.S. patent application Ser. Nos. 10/444,853; 10/981,966; 12/064,014 are incorporated hereby as references for the purpose of describing chemical modifications that are suitable for use with the siNAs of the invention.

[0221] In certain specific embodiments of the invention, at least one modified nucleotide is a 2′-deoxy-2-fluoro nucleotide, a 2′-deoxy nucleotide, a 2′-O-alkyl (e.g., 2′-O-methyl) nucleotide, or a locked nucleic acid (LNA) nucleotide as is generally recognized in the art.

[0222] In yet other embodiment of the invention, at least one nucleotide has a ribo-like, Northern or A form helix configuration (see e.g., Saenger, Principles of Nucleic Acid Structure, Springer-Verlag ed., 1984). Non-limiting examples of nucleotides having a Northern configuration include locked nucleic acid (LNA) nucleotides (e.g., 2′-O, 4′-C-methylene-(D-ribofuranosyl) nucleotides); 2′-methoxyethoxy (MOE) nucleotides; 2′-methyl-thio-ethyl nucleotides, 2′-deoxy-2′-fluoro nucleotides; 2′-deoxy-2′-chloro nucleotides; 2′-azido nucleotides; 2′-O-trifluoromethyl nucleotides; 2′-O-ethyl-trifluoromethoxy nucleotides; 2′-O-difluoromethoxy-ethoxy nucleotides; 4′-thio nucleotides and 2′-O-methyl nucleotides.

[0223] In various embodiments, a majority (e.g., greater than 50%) of the pyrimidine nucleotides present in the double-stranded siNA molecule comprises a sugar modification. In some of the same and/or other embodiments, a majority (e.g., greater than 50%) of the purine nucleotides present in the double-stranded siNA molecule comprises a sugar modification.

[0224] In some embodiments, the pyrimidine nucleotides in the antisense strand are 2′-O-methyl or 2′-deoxy-2′-fluoro pyrimidine nucleotides and the purine nucleotides present in the antisense strand are 2′-O-methyl nucleotides or 2′-deoxy nucleotides. In other embodiments, the pyrimidine nucleotides in the sense strand are 2′-deoxy-2′-fluoro pyrimidine nucleotides and the purine nucleotides present in the sense strand are 2′-O-methyl or 2′-deoxy purine nucleotides.

[0225] In certain embodiments of the invention, all the pyrimidine nucleotides in the complementary region on the sense strand are 2′-deoxy-2′-fluoro pyrimidine nucleotides. In certain embodiments, all of the pyrimidine nucleotides in the complementary region of the antisense strand are 2′-deoxy-2′-fluoro pyrimidine nucleotides. In certain embodiments, all the purine nucleotides in the complementary region on the sense strand are 2′-deoxy purine nucleotides. In certain embodiments, all of the purines in the complementary region on the antisense strand are 2′-O-methyl purine nucleotides. In certain embodiments, all of the pyrimidine nucleotides in the complementary regions on the sense strand are 2′-deoxy-2′-fluoro pyrimidine nucleotides; all of the pyrimidine nucleotides in the complementary region of the antisense strand are 2′-deoxy-2′-fluoro pyrimidine nucleotides; all the purine nucleotides in the complementary region on the sense strand are 2′-deoxy purine nucleotides and all of the purines in the complementary region on the antisense strand are 2′-O-methyl purine nucleotides.

[0226] In some embodiments, at least 5 or more of the pyrimidine nucleotides in one or both stands are 2′-deoxy-2′-fluoro pyrimidine nucleotides. In some embodiments, at least 5 or more of the pyrimidine nucleotides in one or both stands are 2′-O-methyl pyrimidine nucleotides. In some embodiments, at least 5 or more of the purine nucleotides in one or both stands are 2′-deoxy-2′-fluoro purine nucleotides In some embodiments, at least 5 or more of the purine nucleotides in one or both stands are 2′-O-methyl purine nucleotides.

[0227] In certain embodiments, the purines and pyrimidines are differentially modified at the 2′-sugar position (i.e., at least one purine has a different modification from at least one pyrimidine in the same or different strand at the 2′-sugar position). For example, in some instances, at least 5 or more of the pyrimidine nucleotides in one or both stands are 2′-deoxy-2′-fluoro pyrimidine nucleotides and at least 5 or more purine nucleotides in one or both strands are 2′-O-methyl purine nucleotides. In other instances at least 5 or more of the pyrimidine nucleotides in one or both stands are 2′-O-methyl pyrimidine nucleotides and at least 5 or more purine nucleotides in one or both strands are 2′-deoxy-2′-fluoro purine nucleotides.

[0228] Further non-limiting examples of sense and antisense strands of such siNA molecules having various modifications and modifications patterns are shown in FIGS. 2 and 3.

[0229] Any of the above described modifications, or combinations thereof, including those in the references cited, can be applied to any of the siNA molecules of the invention.

[0230] The modified siNA molecules of the invention can comprise modifications at various locations within the siNA molecule. In some embodiments, the double-stranded siNA molecule of the invention comprises modified nucleotides at internal base paired positions within the siNA duplex. In other embodiments, a double-stranded siNA molecule of the invention comprises modified nucleotides at non-base paired or overhang regions of the siNA molecule. In yet other embodiments, a double-stranded siNA molecule of the invention comprises modified nucleotides at terminal positions of the siNA molecule. For example, such terminal regions include the 3′-position and/or 5′-position of the sense and/or antisense strand or region of the siNA molecule. Additionally, any of the modified siNA molecules of the invention can have a modification in one or both oligonucleotide strands of the siNA duplex, for example in the sense strand, the antisense strand, or both strands. Moreover, with regard to chemical modifications of the siNA molecules of the invention, each strand of the double-stranded siNA molecules of the invention can have one or more chemical modifications, such that each strand comprises a different pattern of chemical modifications.

[0231] In certain embodiments each strand of a double-stranded siNA molecule of the invention comprises a different pattern of chemical modifications, such as any Stab modification chemistries described herein (see Table 8) or any combination thereof, i.e., different combinations of defined Stabilzation chemistry (Stab) sense and antisense strands. Further, non-limiting examples of modification schemes that could give rise to different patterns of modifications are shown in Table 8. The stabilization chemistries referred to in Table 8 as Stab, can be combined in any combination of sense/antisense chemistries, such as Stab 7/8, Stab 7/11, Stab 8/8, Stab 18/8, Stab 18/11, Stab 12/13, Stab 7/13, Stab 18/13, Stab 7/19, Stab 8/19, Stab 18/19, Stab 7/20, Stab 8/20, Stab 18/20, Stab 7/32, Stab 8/32, or Stab 18/32 or any other combination of Stabilization chemistries.

[0232] In any of the siNAs of the invention, one or more (for example 1, 2, 3, 4 or 5) nucleotides at the 5′-end of the guide strand or guide region (also known as antisense strand or antisense region) of the siNA molecule are ribonucleotides.

[0233] In certain embodiments, the present invention provides a double-stranded short interfering nucleic acid (siNA) molecule that modulates the expression of PHD2, wherein the siNA comprises a sense strand and an antisense strand; each strand is independently 15 to 30 nucleotides in length; and the antisense strand comprises at least 15 nucleotides having sequence complementary to any of:

(SEQ ID NO: 1)
5′-GAUGUGUGACAUGUAUAUA-3′;
(SEQ ID NO: 2)
5′-GUUAUGUACGUCAUGUUGA-3′;
(SEQ ID NO: 3)
5′-GUCAUGUUGAUAAUCCAAA-3′;
(SEQ ID NO: 4)
5′-GUGUGACAUGUAUAUAUUA-3′;
(SEQ ID NO: 5)
5′-UGUUGAUAAUCCAAAUGGA-3′;
(SEQ ID NO: 6)
5′-AACGGGUUAUGUACGUCAU-3′;
(SEQ ID NO: 7)
5′-GAUGGAAGAUGUGUGACAU-3′;
(SEQ ID NO: 8)
5′-UGUGUGACAUGUAUAUAUU-3′;
(SEQ ID NO: 9)
5′-GGAAGAUGUGUGACAUGUA-3′;
(SEQ ID NO: 10)
5′-CAUGUAUAUAUUAUCUUAA-3′;
(SEQ ID NO: 11)
5′-UUGAUAAUCCAAAUGGAGA-3′;
(SEQ ID NO: 13)
5′-UGGAAGAUGUGUGACAUGU-3′;
(SEQ ID NO: 25)
5′-GCAAUAACUGUUUGGUAUU-3′;
(SEQ ID NO: 33)
5′-CAUUGAACCCAAAUUUGAU-3′;
(SEQ ID NO: 46)
5′-AACCCAAAUUUGAUAGACU-3′;
(SEQ ID NO: 52)
5′-AUGCUACAAGGUACGCAAU-3′;
(SEQ ID NO: 54)
5′-AGCCCAGUUUGCUGACAUU-3′;
or
(SEQ ID NO: 79)
5′-CUAAAGUAAAAUAUCUAAC-3′.

[0234] In some embodiments, the antisense strand of a siNA molecule of the invention comprises at least a 15 nucleotide sequence of:

(SEQ ID NO: 880)
5′-UAUAUACAUGUCACACAUC-3′;
(SEQ ID NO: 881)
5′-UCAACAUGACGUACAUAAC-3′;
(SEQ ID NO: 882)
5′-UUUGGAUUAUCAACAUGAC-3′;
(SEQ ID NO: 883)
5′-UAAUAUAUACAUGUCACAC-3′;
(SEQ ID NO: 884)
5′-UCCAUUUGGAUUAUCAACA-3′;
(SEQ ID NO: 885)
5′-AUGACGUACAUAACCCGUU-3′;
(SEQ ID NO: 886)
5′-AUGUCACACAUCUUCCAUC-3′;
(SEQ ID NO: 887)
5′-AAUAUAUACAUGUCACACA-3′;
(SEQ ID NO: 888)
5′-UACAUGUCACACAUCUUCC-3′;
(SEQ ID NO: 889)
5′-UUAAGAUAAUAUAUACAUG-3′;
(SEQ ID NO: 890)
5′-UCUCCAUUUGGAUUAUCAA-3′;
(SEQ ID NO: 892)
5′-ACAUGUCACACAUCUUCCA-3′;
(SEQ ID NO: 904)
5′-AAUACCAAACAGUUAUUGC-3′;
(SEQ ID NO: 912)
5′-AUCAAAUUUGGGUUCAAUG-3′;
(SEQ ID NO: 925)
5′-AGUCUAUCAAAUUUGGGUU-3′;
(SEQ ID NO: 931)
5′-AUUGCGUACCUUGUAGCAU-3′;
(SEQ ID NO: 933)
5′-AAUGUCAGCAAACUGGGCU-3′;
or
(SEQ ID NO: 958)
5′-GUUAGAUAUUUUACUUUAG-3′.

[0235] In some embodiments, the sense strand of a siNA molecule of the invention comprises at least a 15 nucleotide sequence of:

(SEQ ID NO: 1)
5′-GAUGUGUGACAUGUAUAUA-3′;
(SEQ ID NO: 2)
5′-GUUAUGUACGUCAUGUUGA-3′;
(SEQ ID NO: 3)
5′-GUCAUGUUGAUAAUCCAAA-3′;
(SEQ ID NO: 4)
5′-GUGUGACAUGUAUAUAUUA-3′;
(SEQ ID NO: 5)
5′-UGUUGAUAAUCCAAAUGGA-3′;
(SEQ ID NO: 6)
5′-AACGGGUUAUGUACGUCAU-3′;
(SEQ ID NO: 7)
5′-GAUGGAAGAUGUGUGACAU-3′;
(SEQ ID NO: 8)
5′-UGUGUGACAUGUAUAUAUU-3′;
(SEQ ID NO: 9)
5′-GGAAGAUGUGUGACAUGUA-3′;
(SEQ ID NO: 10)
5′-CAUGUAUAUAUUAUCUUAA-3′;
(SEQ ID NO: 11)
5′-UUGAUAAUCCAAAUGGAGA-3′;
(SEQ ID NO: 13)
5′-UGGAAGAUGUGUGACAUGU-3′;
(SEQ ID NO: 25)
5′-GCAAUAACUGUUUGGUAUU-3′;
(SEQ ID NO: 33)
5′-CAUUGAACCCAAAUUUGAU-3′;
(SEQ ID NO: 46)
5′-AACCCAAAUUUGAUAGACU-3′;
(SEQ ID NO: 52)
5′-AUGCUACAAGGUACGCAAU-3′;
(SEQ ID NO: 54)
5′-AGCCCAGUUUGCUGACAUU-3′;
or
(SEQ ID NO: 79)
5′-CUAAAGUAAAAUAUCUAAC-3′.

[0236] In some embodiments, a siNA molecule of the invention comprises any of:

(SEQ ID NO: 1)
5′-GAUGUGUGACAUGUAUAUA-3′
and
(SEQ ID NO: 880)
5′-UAUAUACAUGUCACACAUC-3′;
or
(SEQ ID NO: 2)
5′-GUUAUGUACGUCAUGUUGA-3′
and
(SEQ ID NO: 881)
5′-UCAACAUGACGUACAUAAC-3′;
or
(SEQ ID NO: 3)
5′-GUCAUGUUGAUAAUCCAAA-3′
and
(SEQ ID NO: 882)
5′-UUUGGAUUAUCAACAUGAC-3′;
or
(SEQ ID NO: 4)
5′-GUGUGACAUGUAUAUAUUA-3′
and
(SEQ ID NO: 883)
5′-UAAUAUAUACAUGUCACAC-3′;
or
(SEQ ID NO: 5)
5′-UGUUGAUAAUCCAAAUGGA-3′
and
(SEQ ID NO: 884)
5′-UCCAUUUGGAUUAUCAACA-3′;
or
(SEQ ID NO: 6)
5′-AACGGGUUAUGUACGUCAU-3′
and
(SEQ ID NO: 885)
5′-AUGACGUACAUAACCCGUU-3′;
or
(SEQ ID NO: 7)
5′-GAUGGAAGAUGUGUGACAU-3′
and
(SEQ ID NO: 886)
5′-AUGUCACACAUCUUCCAUC-3′;
or
(SEQ ID NO: 8)
5′-UGUGUGACAUGUAUAUAUU-3′
and
(SEQ ID NO: 887)
5′-AAUAUAUACAUGUCACACA-3′;
or
(SEQ ID NO: 9)
5′-GGAAGAUGUGUGACAUGUA-3′
and
(SEQ ID NO: 888)
5′-UACAUGUCACACAUCUUCC-3′;
or
(SEQ ID NO: 10)
5′-CAUGUAUAUAUUAUCUUAA-3′
and
(SEQ ID NO: 889)
5′-UUAAGAUAAUAUAUACAUG-3′;
or
(SEQ ID NO: 11)
5′-UUGAUAAUCCAAAUGGAGA-3′
and
(SEQ ID NO: 890)
5′-UCUCCAUUUGGAUUAUCAA-3′;
or
(SEQ ID NO: 13)
5′-UGGAAGAUGUGUGACAUGU-3′
and
(SEQ ID NO: 892)
5′-ACAUGUCACACAUCUUCCA-3′;
or
(SEQ ID NO: 25)
5′-GCAAUAACUGUUUGGUAUU-3′
and
(SEQ ID NO: 904)
5′-AAUACCAAACAGUUAUUGC-3′;
or
(SEQ ID NO: 33)
5′-CAUUGAACCCAAAUUUGAU-3′
and
(SEQ ID NO: 912)
5′-AUCAAAUUUGGGUUCAAUG-3′;
or
(SEQ ID NO: 46)
5′-AACCCAAAUUUGAUAGACU-3′
and
(SEQ ID NO: 925)
5′-AGUCUAUCAAAUUUGGGUU-3′;
or
(SEQ ID NO: 52)
5′-AUGCUACAAGGUACGCAAU-3′
and
(SEQ ID NO: 931)
5′-AUUGCGUACCUUGUAGCAU-3′;
or
(SEQ ID NO: 54)
5′-AGCCCAGUUUGCUGACAUU-3′
and
(SEQ ID NO: 933)
5′-AAUGUCAGCAAACUGGGCU-3′;
or
(SEQ ID NO: 79)
5′-CUAAAGUAAAAUAUCUAAC-3′
and
(SEQ ID NO: 958)
5′-GUUAGAUAUUUUACUUUAG-3′.

[0237] Any of the above described modifications, or combinations thereof, including those in the references cited, can be applied to any of these embodiments.

[0238] In certain embodiments, the nucleotides of the at least a 15 nucleotide sequence of SEQ ID NO: 1, SEQ ID NO: 880, SEQ ID NO: 2, SEQ ID NO: 881, SEQ ID NO: 3, SEQ ID NO: 882, SEQ ID NO: 4, SEQ ID NO: 883, SEQ ID NO: 5, SEQ ID NO: 884, SEQ ID NO: 6, SEQ ID NO: 885, SEQ ID NO: 7, SEQ ID NO: 886, SEQ ID NO: 8, SEQ ID NO: 887, SEQ ID NO: 9, SEQ ID NO: 888, SEQ ID NO: 10, SEQ ID NO: 889, SEQ ID NO: 11, SEQ ID NO: 890, SEQ ID NO: 13, SEQ ID NO: 892, SEQ ID NO: 25, SEQ ID NO: 904, SEQ ID NO: 33, SEQ ID NO: 912, SEQ ID NO: 46, SEQ ID NO: 925, SEQ ID NO: 52, SEQ ID NO: 931, SEQ ID NO: 54, SEQ ID NO: 933, SEQ ID NO: 79, or SEQ ID NO: 958; form a contiguous stretch of nucleotides.

[0239] In some embodiments, the siNA molecule can contain one or more nucleotide deletions, substitutions, mismatches and/or additions to the at least 15 nucleotide sequence of SEQ ID NO: 1, SEQ ID NO: 880, SEQ ID NO: 2, SEQ ID NO: 881, SEQ ID NO: 3, SEQ ID NO: 882, SEQ ID NO: 4, SEQ ID NO: 883, SEQ ID NO: 5, SEQ ID NO: 884, SEQ ID NO: 6, SEQ ID NO: 885, SEQ ID NO: 7, SEQ ID NO: 886, SEQ ID NO: 8, SEQ ID NO: 887, SEQ ID NO: 9, SEQ ID NO: 888, SEQ ID NO: 10, SEQ ID NO: 889, SEQ ID NO: 11, SEQ ID NO: 890, SEQ ID NO: 13, SEQ ID NO: 892, SEQ ID NO: 25, SEQ ID NO: 904, SEQ ID NO: 33, SEQ ID NO: 912, SEQ ID NO: 46, SEQ ID NO: 925, SEQ ID NO: 52, SEQ ID NO: 931, SEQ ID NO: 54, SEQ ID NO: 933, SEQ ID NO: 79, or SEQ ID NO: 958; provided, however, that the siNA molecule maintains its activity, for example, to mediate RNAi. In a non-limiting example, the deletion, substitution, mismatch and/or addition can result in a loop or bulge, or alternately a wobble or other alternative (non Watson-Crick) base pair.

[0240] In certain embodiments of the invention, double-stranded siNA molecules are provided, wherein the molecule has a sense strand and an antisense strand and comprises the following formula (A):

[chemical structure]

[0241] wherein, the upper strand is the sense strand and the lower strand is the antisense strand of the double-stranded nucleic acid molecule; wherein the antisense strand comprises at least a 15 nucleotide sequence of SEQ ID NO: 880, SEQ ID NO: 881, SEQ ID NO: 882, SEQ ID NO: 883, SEQ ID NO: 884, SEQ ID NO: 885, SEQ ID NO: 886, SEQ ID NO: 887, SEQ ID NO: 888, SEQ ID NO: 889, SEQ ID NO: 890, SEQ ID NO: 892, SEQ ID NO: 904, SEQ ID NO: 912, SEQ ID NO: 925, SEQ ID NO: 931, SEQ ID NO: 933, or SEQ ID NO: 958, and the sense strand comprises a sequence having complementarity to the antisense strand;
[0242] each N is independently a nucleotide which is unmodified or chemically modified or a non-nucleotide;
[0243] each B is a terminal cap that is present or absent;
[0244] (N) represents overhanging nucleotides, each of which is independently unmodified or chemically modified;
[0245] [N] represents nucleotides that are ribonucleotides;
[0246] X1 and X2 are independently integers from 0 to 4;
[0247] X3 is an integer from 15 to 30;
[0248] X4 is an integer from 9 to 30; and
[0249] X5 is an integer from 0 to 6, provided that the sum of X4 and X5 is 15-30.

[0250] In certain embodiments, the nucleotides of the at least a 15 nucleotide sequence of SEQ ID NO: 880, SEQ ID NO: 881, SEQ ID NO: 882, SEQ ID NO: 883, SEQ ID NO: 884, SEQ ID NO: 885, SEQ ID NO: 886, SEQ ID NO: 887, SEQ ID NO: 888, SEQ ID NO: 889, SEQ ID NO: 890, SEQ ID NO: 892, SEQ ID NO: 904, SEQ ID NO: 912, SEQ ID NO: 925, SEQ ID NO: 931, SEQ ID NO: 933, or SEQ ID NO: 958, form a contiguous stretch of nucleotides.

[0251] In some embodiments, the siNA molecule of formula A can contain one or more nucleotide deletions, substitutions, mismatches and/or additions to the at least 15 nucleotide sequence of SEQ ID NO: 880, SEQ ID NO: 881, SEQ ID NO: 882, SEQ ID NO: 883, SEQ ID NO: 884, SEQ ID NO: 885, SEQ ID NO: 886, SEQ ID NO: 887, SEQ ID NO: 888, SEQ ID NO: 889, SEQ ID NO: 890, SEQ ID NO: 892, SEQ ID NO: 904, SEQ ID NO: 912, SEQ ID NO: 925, SEQ ID NO: 931, SEQ ID NO: 933, or SEQ ID NO: 958; provided, however, that the siNA molecule maintains its activity, for example, to mediate RNAi. In a non-limiting example, the deletion, substitution, mismatch and/or addition can result in a loop or bulge, or alternately a wobble or other alternative (non Watson-Crick) base pair.

[0252] In one embodiment, the invention features a double-stranded short interfering nucleic acid (siNA) of formula (A); wherein
[0253] (a) one or more pyrimidine nucleotides in N_{X4} positions are independently 2′-deoxy-2′-fluoro nucleotides, 2′-O-alkyl nucleotides, 2′-deoxy nucleotides, ribonucleotides, or any combination thereof;
[0254] (b) one or more purine nucleotides in N_{X4} positions are independently 2′-deoxy-2′-fluoro nucleotides, 2′-O-alkyl nucleotides, 2′-deoxy nucleotides, ribonucleotides, or any combination thereof;
[0255] (c) one or more pyrimidine nucleotides in N_{X3} positions are independently 2′-deoxy-2′-fluoro nucleotides, 2′-O-alkyl nucleotides, 2′-deoxy nucleotides, ribonucleotides, or any combination thereof; and
[0256] (d) one or more purine nucleotides in N_{X3} positions are independently 2′-deoxy-2′-fluoro nucleotides, 2′-O-alkyl nucleotides, 2′-deoxy nucleotides, ribonucleotides, or any combination thereof.

[0257] In certain embodiments, the invention features a double-stranded short interfering nucleic acid (siNA) molecule of formula (A); wherein
[0258] (a) 1, 2, 3, 4, 5 or more pyrimidine nucleotides in N_{X4} positions are 2′-deoxy-2′-fluoro nucleotides;
[0259] (b) 1, 2, 3, 4, 5 or more purine nucleotides in N_{X4} positions are 2′-O-alkyl nucleotides;
[0260] (c) 1, 2, 3, 4, 5 or more pyrimidine nucleotides in N_{X3} positions are 2′-deoxy-2′-fluoro nucleotides; and
[0261] (d) 1, 2, 3, 4, 5 or more purine nucleotides in N_{X3} positions are 2′-deoxy nucleotides.

[0262] In certain embodiments, the invention features a double-stranded short interfering nucleic acid (siNA) molecule of formula (A); wherein
[0263] (a) 1, 2, 3, 4, 5 or more pyrimidine nucleotides in N_{X4} positions are 2′-O-alkyl nucleotides;
[0264] (b) 1, 2, 3, 4, 5 or more purine nucleotides in N_{X4} positions are ribonucleotides;
[0265] (c) 1, 2, 3, 4, 5 or more pyrimidine nucleotides in N_{X3} positions are 2′-O-alkyl nucleotides; and
[0266] (d) 1, 2, 3, 4, 5 or more purine nucleotides in N_{X3} positions are ribonucleotides.

[0267] In certain embodiments, the invention features a double-stranded short interfering nucleic acid (siNA) molecule of formula (A); wherein
[0268] (a) 1, 2, 3, 4, 5 or more pyrimidine nucleotides in N_{X4} positions are 2′-deoxy-2′-fluoro nucleotides;
[0269] (b) 1, 2, 3, 4, 5 or more purine nucleotides in N_{X4} positions are 2′-O-alkyl nucleotides;
[0270] (c) 1, 2, 3, 4, 5 or more pyrimidine nucleotides in N_{X3} positions are 2′-O-alkyl nucleotides; and
[0271] (d) 1, 2, 3, 4, 5 or more purine nucleotides in N_{X3} positions are 2′-deoxy-2′-fluoro nucleotides.

[0272] In certain embodiments, the invention features a double-stranded short interfering nucleic acid (siNA) molecule of formula (A) further comprising one or more phosphorothioate internucleotide linkages.

[0273] In some embodiments, siNA molecules having formula A comprise a terminal phosphate group at the 5′-end of the antisense strand or antisense region of the nucleic acid molecule.

[0274] In various embodiments, siNA molecules having formula A comprise X5=0, 1, 2, or 3; each X1 and X2=1 or 2; X3=18, 19, 20, 21, 22, or 23, and X4=17, 18, 19, 20, 21, 22, or 23.

[0275] In certain embodiments, siNA molecules having formula A comprise X5=3. In other embodiments siNA molecules having formula A comprise X5=0.

[0276] In certain embodiments, siNA molecules having formula A comprise X1=2 and X2=2.

[0277] In various embodiments, siNA molecules having formula A comprise X5=0, X1=2, and X2=2. In other embodiments, siNA molecules having formula A comprise X5=3, X1=2, and X2=2.

[0278] In one specific embodiment, an siNA molecule having formula A comprises X5=3; each X1 and X2=2; X3=19, and X4=16.

[0279] In another specific embodiment, an siNA molecule having formula A comprises X5=0; each X1 and X2=2; X3=19, and X4=19.

[0280] In certain embodiments, siNA molecules having formula A comprise caps (B) at the 3′ and 5′ ends of the sense strand or sense region.

[0281] In certain embodiments, siNA molecules having formula A comprise caps (B) at the 3′-end of the antisense strand or antisense region.

[0282] In various embodiments, siNA molecules having formula A comprise caps (B) at the 3′ and 5′ ends of the sense strand or sense region and caps (B) at the 3′-end of the antisense strand or antisense region.

[0283] In yet other embodiments, siNA molecules having formula A comprise caps (B) only at the 5′-end of the sense (upper) strand of the double-stranded nucleic acid molecule.

[0284] In some embodiments, siNA molecules having formula A further comprise one or more phosphorothioate internucleotide linkages between the nucleotides. In certain embodiments, siNA molecules having formula A comprise one or more phosphorothioate internucleotide linkages between the first terminal (N) and the adjacent nucleotide on the 3′end of the sense strand, antisense strand, or both sense strand and antisense strands of the nucleic acid molecule. For example, a double-stranded nucleic acid molecule can comprise X1 and/or X2=2 having overhanging nucleotide positions with a phosphorothioate internucleotide linkage, e.g., (NsN) where “s” indicates phosphorothioate.

[0285] In some embodiments, one or more of the nucleotides of siNA molecules having formula A have a universal base.

[0286] In certain embodiments, siNA molecules having formula A have at position 14 from the 5′-end of the antisense strand a ribonucleotide when the nucleotide at that position 14 is a purine. In other embodiments, siNA molecules having formula A have at position 14 from the 5′-end of the antisense strand a ribonucleotide, a 2′-deoxy-2′-fluoro nucleotide or a 2′-O-methyl nucleotide when the nucleotide at that position 14 is a pyrimidine nucleotide.

[0287] In some embodiments, siNA molecules having formula A comprises (N) nucleotides in the antisense strand (lower strand) that are complementary to nucleotides in a PHD2 target polynucleotide sequence, which also has complementarity to the N and [N] nucleotides of the antisense (lower) strand.

[0288] Any of the above described modifications, or combinations thereof, discussed above as applicable to siNAs of the invention, including those in the references cited, can be applied to any of the embodiments to siNA molecules having formula A.

### C. Generation/Synthesis of siNA Molecules

[0289] The siNAs of the invention can be obtained using a number of techniques known to those of skill in the art. For example the siNA can be chemically synthesized or may be encoded by plasmid (e.g., transcribed as sequences that automatically fold into duplexes with hairpin loops.). siNA can also be generated by cleavage of longer dsRNA (e.g., dsRNA greater than about 25 nucleotides in length) by the E coli RNase II or Dicer. These enzymes process the dsRNA into biologically active siNA (see, e.g., Yang et al., PNAS USA 99:9942-9947 (2002); Calegari et al. PNAS USA 99:14236 (2002) Byron et al. Ambion Tech Notes; 10 (1):4-6 (2009); Kawaski et al., Nucleic Acids Res., 31:981-987 (2003), Knight and Bass, Science, 293:2269-2271 (2001) and Roberston et al., J. Biol. Chem 243:82(1969).

### 1. Chemical Synthesis

[0290] Preferably, siNA of the invention are chemically synthesized. Oligonucleotides (e.g., certain modified oligonucleotides or portions of oligonucleotides lacking ribonucleotides) are synthesized using protocols known in the art, for example as described in Caruthers et al., 1992, Methods in Enzymology 211, 3-19, Thompson et al., International PCT Publication No. WO 99/54459, Wincott et al., 1995, Nucleic Acids Res. 23, 2677-2684, Wincott et al., 1997, Methods Mol. Bio., 74, 59, Brennan et al., 1998, Biotechnol Bioeng., 61, 33-45, and Brennan, U.S. Pat. No. 6,001,311. The synthesis of oligonucleotides makes use of common nucleic acid protecting and coupling groups, such as dimethoxytrityl at the 5′-end, and phosphoramidites at the 3′-end.

[0291] siNA molecules without modifications are synthesized using procedures as described in Usman et al., 1987, J. Am. Chem. Soc., 109, 7845; Scaringe et al., 1990, Nucleic Acids Res., 18, 5433. These syntheses makes use of common nucleic acid protecting and coupling groups, such as dimethoxytrityl at the 5′-end, and phosphoramidites at the 3′-end that can be used for certain siNA molecules of the invention.

[0292] In certain embodiments, the siNA molecules of the invention are synthesized, deprotected, and analyzed according to methods described in U.S. Pat. Nos. 6,995,259, 6,686,463, 6,673,918, 6,649,751, 6,989,442, and U.S. patent application Ser. No. 10/190,359.

[0293] In a non-limiting synthesis example, small scale syntheses are conducted on a 394 Applied Biosystems, Inc. synthesizer using a 0.2 μmol scale protocol with a 2.5 min coupling step for 2′-O-methylated nucleotides and a 45 second coupling step for 2′-deoxy nucleotides or 2′-deoxy-2′-fluoro nucleotides. Table 9 outlines the amounts and the contact times of the reagents used in the synthesis cycle.

[0294] Alternatively, the siNA molecules of the present invention can be synthesized separately and joined together post-synthetically, for example, by ligation (Moore et al., 1992, Science 256, 9923; Draper et al., International PCT Publication No. WO 93/23569; Shabarova et al., 1991, Nucleic Acids Research 19, 4247; Bellon et al., 1997, Nucleosides & Nucleotides, 16, 951; Bellon et al., 1997, Bioconjugate Chem. 8, 204), or by hybridization following synthesis and/or deprotection.

[0295] Various siNA molecules of the invention can also be synthesized using the teachings of Scaringe et al., U.S. Pat. Nos. 5,889,136; 6,008,400; and 6,111,086.

### 2. Vector Expression

[0296] Alternatively, siNA molecules of the invention that interact with and down-regulate gene encoding target PHD2 molecules can be expressed and delivered from transcription units (see for example Couture et al., 1996, TIG., 12, 510) inserted into DNA or RNA vectors. The recombinant vectors can be DNA plasmids or viral vectors. siNA expressing viral vectors can be constructed based on, but not limited to, adeno-associated virus, retrovirus, adenovirus, or alphavirus.

[0297] In some embodiments, pol III based constructs are used to express nucleic acid molecules of the invention. Transcription of the siNA molecule sequences can be driven from a promoter for eukaryotic RNA polymerase I (pol I), RNA polymerase II (pol II), or RNA polymerase III (pol III). (see for example, Thompson, U.S. Pat. Nos. 5,902,880 and 6,146,886). (See also, Izant and Weintraub, 1985, Science, 229, 345; McGarry and Lindquist, 1986, Proc. Natl. Acad. Sci., USA 83, 399; Scanlon et al., 1991, Proc. Natl. Acad. Sci. USA, 88, 10591-5; Kashani-Sabet et al., 1992, Antisense Res. Dev., 2, 3-15; Dropulic et al., 1992, J. Virol., 66, 1432-41; Weerasinghe et al., 1991, J. Virol., 65, 5531-4; Ojwang et al., 1992, Proc. Natl. Acad. Sci. USA, 89, 10802-6; Chen et al., 1992, Nucleic Acids Res., 20, 4581-9; Sarver et al., 1990 Science, 247, 1222-1225; Thompson et al., 1995, Nucleic Acids Res., 23, 2259; Good et al., 1997, Gene Therapy, 4, 45. Transcripts from pol II or pol III promoters are expressed at high levels in all cells; the levels of a given pol II promoter in a given cell type depends on the nature of the gene regulatory sequences (enhancers, silencers, etc.) present nearby. Prokaryotic RNA polymerase promoters are also used, providing that the prokaryotic RNA polymerase enzyme is expressed in the appropriate cells (Elroy-Stein and Moss, 1990, Proc. Natl. Acad. Sci. USA, 87, 6743-7; Gao and Huang 1993, Nucleic Acids Res., 21, 2867-72; Lieber et al., 1993, Methods Enzymol., 217, 47-66; Zhou et al., 1990, Mol. Cell. Biol., 10, 4529-37). Several investigators have demonstrated that nucleic acid molecules expressed from such promoters can function in mammalian cells (e.g. Kashani-Sabet et al., 1992, Antisense Res. Dev., 2, 3-15; Ojwang et al., 1992, Proc. Natl. Acad. Sci. USA, 89, 10802-6; Chen et al., 1992, Nucleic Acids Res., 20, 4581-9; Yu et al., 1993, Proc. Natl. Acad. Sci. USA, 90, 6340-4; L'Huillier et al., 1992, EMBO J., 11, 4411-8; Lisziewicz et al., 1993, Proc. Natl. Acad. Sci. U. S. A, 90, 8000-4; Thompson et al., 1995, Nucleic Acids Res., 23, 2259; Sullenger & Cech, 1993, Science, 262, 1566). More specifically, transcription units such as the ones derived from genes encoding U6 small nuclear (snRNA), transfer RNA (tRNA) and adenovirus VA RNA are useful in generating high concentrations of desired RNA molecules such as siNA in cells (Thompson et al., supra; Couture and Stinchcomb, 1996, supra; Noonberg et al., 1994, Nucleic Acid Res., 22, 2830; Noonberg et al., U.S. Pat. No. 5,624,803; Good et al., 1997, Gene Ther., 4, 45; Beigelman et al., International PCT Publication No. WO 96/18736. The above siNA transcription units can be incorporated into a variety of vectors for introduction into mammalian cells, including but not restricted to, plasmid DNA vectors, viral DNA vectors (such as adenovirus or adeno-associated virus vectors), or viral RNA vectors (such as retroviral or alphavirus vectors) (for a review see Couture and Stinchcomb, 1996, supra).

[0298] Vectors used to express the siNA molecules of the invention can encode one or both strands of an siNA duplex, or a single self-complementary strand that self hybridizes into an siNA duplex. The nucleic acid sequences encoding the siNA molecules of the instant invention can be operably linked in a manner that allows expression of the siNA molecule (see for example Paul et al., 2002, Nature Biotechnology, 19, 505; Miyagishi and Taira, 2002, Nature Biotechnology, 19, 497; Lee et al., 2002, Nature Biotechnology, 19, 500; and Novina et al., 2002, Nature Medicine, advance online publication doi:10.1038/nm725).

### D. Carrier/Delivery Systems

[0299] The siNA molecules of the invention are added directly, or can be complexed with cationic lipids, packaged within liposomes, or as a recombinant plasmid or viral vectors which express the siNA molecules, or otherwise delivered to target cells or tissues. Methods for the delivery of nucleic acid molecules are described in Akhtar et al., 1992, Trends Cell Bio., 2, 139; Delivery Strategies for Antisense Oligonucleotide Therapeutics, ed. Akhtar, 1995, Maurer et al., 1999, Mol. Membr. Biol., 16, 129-140; Hofland and Huang, 1999, Handb. Exp. Pharmacol., 137, 165-192; and Lee et al., 2000, ACS Symp. Ser., 752, 184-192. Beigelman et al., U.S. Pat. No. 6,395,713 and Sullivan et al., PCT WO 94/02595 further describe the general methods for delivery of nucleic acid molecules. These protocols can be utilized for the delivery of virtually any nucleic acid molecule. Nucleic acid molecules can be administered to cells by a variety of methods known to those of skill in the art, including, but not restricted to, encapsulation in liposomes, by iontophoresis, or by incorporation into other vehicles, such as biodegradable polymers, hydrogels, cyclodextrins (see for example, Gonzalez et al., 1999, Bioconjugate Chem., 10, 1068-1074; Wang et al., International PCT Publication Nos. WO 03/47518 and WO 03/46185), poly(lactic-co-glycolic)acid (PLGA) and PLCA microspheres (see for example U.S. Pat. No. 6,447,796 and US Patent Application Publication No. US 2002130430), biodegradable nanocapsules, and bioadhesive microspheres, or by proteinaceous vectors (O'Hare and Normand, International PCT Publication No. WO 00/53722).

[0300] In one aspect, the present invention provides carrier systems containing the siNA molecules described herein. In some embodiments, the carrier system is a lipid-based carrier system, cationic lipid, or liposome nucleic acid complexes, a liposome, a micelle, a virosome, a lipid nanoparticle or a mixture thereof. In other embodiments, the carrier system is a polymer-based carrier system such as a cationic polymer-nucleic acid complex. In additional embodiments, the carrier system is a cyclodextrin-based carrier system such as a cyclodextrin polymer-nucleic acid complex. In further embodiments, the carrier system is a protein-based carrier system such as a cationic peptide-nucleic acid complex. Preferably, the carrier system is a lipid nanoparticle (“LNP”) formulation.

[0301] In certain embodiments, the siNA molecules of the invention are formulated with a lipid nanoparticle composition such as is described in U.S. patent application Ser. Nos. 11/353,630, 11/586,102, 61/189,295, 61/204,878, 61/235,476, 61/249,807, 61/298,022, 61/351,373, 61/347,640, 61/345,754, 61/322,054, 12/640,342, and 12/617,079, and PCT Applications Nos. PCT/US10/020013 and PCT/US09/053336. In certain embodiments, the siNA molecules of the invention are formulated with a lipid nanoparticle composition comprising a cationic lipid/Cholesterol/PEG-C-DMA/DSPC in a 40/48/2/10 ratio or a cationic lipid/Cholesterol/PEG-DMG/DSPC in a 40/48/2/10 ratio. In certain embodiments, the cationic lipid is DLinDMA (see Table 11), the PEG is PEG-DMG, and the N/P ratio of the formulation is 2.8 (see Tables 10 & 11). In more preferred embodiments, the siNA molecules of the invention are formulated with a lipid nanoparticle composition comprising the cationic lipid CLinDMA (2-{4-[(3b)-cholest-5-en-3-yloxy]-butoxy}-N,N-dimethyl-3-[(9Z,12Z)-octadeca-9,12-dien-1-yloxy]propan-1-amine), cholesterol, and PEG-DMG (monomethoxy(polyethyleneglycol)-1,2-dimyristoylglycerol) in 50.3:44.3:5.4 molar ratio respectively (see Tables 10 & 11).

[0302] In various embodiments, lipid nanoparticle formulations described in Table 10 are applied to any siNA molecule or combination of siNA molecules herein. In some embodiments, the invention features a composition comprising an siNA molecule of the invention formulated as any of formulation LNP-051; LNP-053; LNP-054; LNP-069; LNP-073; LNP-077; LNP-080; LNP-082; LNP-083; LNP-060; LNP-061; LNP-086; LNP-097; LNP-098; LNP-099; LNP-100; LNP-101; LNP-102; LNP-103; LNP-104 or LNP-201 (see Table 10).

[0303] In certain other embodiments, the invention features a composition comprising an siNA molecule of the invention formulated with any of the cationic lipid formulations described in U.S. Patent Application Nos. 61/189,295, 61/204,878, 61/235,476, 61/249,807, and 61/298,022.

[0304] In other embodiments, the invention features conjugates and/or complexes of siNA molecules of the invention. Such conjugates and/or complexes can be used to facilitate delivery of siNA molecules into a biological system, such as a cell. The conjugates and complexes provided by the instant invention can impart therapeutic activity by transferring therapeutic compounds across cellular membranes, altering the pharmacokinetics, and/or modulating the localization of nucleic acid molecules of the invention. Non-limiting, examples of such conjugates are described in U.S. Publication Nos. US2008/0152661 A1 and US 2004/0162260 A1 (e.g., CDM-LBA, CDM-Pip-LBA, CDM-PEG, CDM-NAG, etc.) and U.S. Patent Application Ser. Nos. 10/427,160 10/201,394, 61/322,422, and 61/315,223; and U.S. Pat. Nos. 6,528,631; 6,335,434; 6,235,886; 6,153,737; 5,214,136; and 5,138,045, which are hereby incorporated by references for the purposes of describing conjugates and complexes that can be combined with the siNAs of the invention.

[0305] In various embodiments, polyethylene glycol (PEG) can be covalently attached to siNA compounds of the present invention. The attached PEG can be any molecular weight, preferably from about 100 to about 50,000 daltons (Da).

[0306] In yet other embodiments, the invention features compositions or formulations comprising surface-modified liposomes containing poly (ethylene glycol) lipids (PEG-modified, or long-circulating liposomes or stealth liposomes) and siNA molecules of the invention, such as is disclosed in for example, International PCT Publication No. WO 96/10391; Ansell et al., International PCT Publication No. WO 96/10390; Holland et al., International PCT Publication No. WO 96/10392.

[0307] In some embodiments, the siNA molecules of the invention can also be formulated or complexed with polyethyleneimine and derivatives thereof, such as polyethyleneimine-polyethyleneglycol-N-acetylgalactosamine (PEI-PEG-GAL) or polyethyleneimine-polyethyleneglycol-tri-N-acetylgalactosamine (PEI-PEG-triGAL) derivatives. In one embodiment, the nucleic acid molecules of the invention are formulated as described in U.S. Patent Application Publication No. 20030077829.

[0308] In other embodiments, siNA molecules of the invention are complexed with membrane disruptive agents such as those described in U.S. Patent Application Publication No. 20010007666. In still other embodiments, the membrane disruptive agent or agents and the siNA molecule are also complexed with a cationic lipid or helper lipid molecule, such as those lipids described in U.S. Pat. No. 6,235,310.

[0309] In certain embodiments, siNA molecules of the invention are complexed with delivery systems as described in U.S. Patent Application Publication Nos. 2003077829; 20050287551; 20050164220; 20050191627; 20050118594; 20050153919; 20050085486; and 20030158133; and International PCT Publication Nos. WO 00/03683 and WO 02/087541.

[0310] In some embodiments, a liposomal formulation of the invention comprises an siNA molecule of the invention (e.g., siNA) formulated or complexed with compounds and compositions described in U.S. Pat. Nos. 6,858,224; 6,534,484; 6,287,591; 6,835,395; 6,586,410; 6,858,225; 6,815,432; 6,586,001; 6,120,798; 6,977,223; 6,998,115; 5,981,501; 5,976,567; 5,705,385; and U.S. Patent Application Publication Nos. 2006/0019912; 2006/0019258; 2006/0008909; 2005/0255153; 2005/0079212; 2005/0008689; 2003/0077829, 2005/0064595, 2005/0175682, 2005/0118253; 2004/0071654; 2005/0244504; 2005/0265961 and 2003/0077829.

[0311] Alternatively, recombinant plasmids and viral vectors, as discussed above, which express siNAs of the invention can be used to deliver the molecules of the invention. Delivery of siNA molecule expressing vectors can be systemic, such as by intravenous or intra-muscular administration, by administration to target cells ex-planted from a subject followed by reintroduction into the subject, or by any other means that would allow for introduction into the desired target cell (for a review see Couture et al., 1996, TIG., 12, 510). Such recombinant plasmids can also be administered directly or in conjunction with a suitable delivery reagents, including, for example, the Mirus Transit LT1 lipophilic reagent; lipofectin; lipofectamine; cellfectin; polycations (e.g., polylysine) or liposomes lipid-based carrier system, cationic lipid, or liposome nucleic acid complexes, a micelle, a virosome, a lipid nanoparticle.

### E. Kits

[0312] The present invention also provides nucleic acids in kit form. The kit may comprise a container. The kit typically contains a nucleic acid of the invention with instructions for its administration. In certain instances, the nucleic acids may have a targeting moiety attached. Methods of attaching targeting moieties (e.g. antibodies, proteins) are known to those of skill in the art. In certain instances, the nucleic acids are chemically modified. In other embodiments, the kit contains more than one siNA molecule of the invention. The kits may comprise an siNA molecule of the invention with a pharmaceutically acceptable carrier or diluent. The kits may further comprise excipients.

### F. Therapeutic Uses/Pharmaceutical Compositions

[0313] The present body of knowledge in PHD2 research indicates the need for methods to assay PHD2 activity and for compounds that can regulate PHD2 expression for research, diagnostic, and therapeutic use. As described infra, the nucleic acid molecules of the present invention can be used in assays to diagnose disease state related of PHD2 levels. In addition, the nucleic acid molecules and pharmaceutical compositions can be used to treat disease states related to PHD2 RNA levels.

1. Disease States Associated with PHD2

[0314] siNAs of the present invention are inhibitors of hypoxia-inducible factor (HIF) prolyl hydroxylase domain 2, i.e., PHD2, and as such are useful in the treatment and prevention of diseases and conditions in which HIF modulation is desirable. Particular disease states that can be associated with HIF and PHD2 expression modulation include cardiovascular diseases (e.g., cardiac insufficiency, coronary heart disease, angina pectoris, myocardial infarction, stroke, atherosclerosis, pulmonary and malignant hypertension and peripheral aterial occlusive disease), blood formation disorders (e.g., idiopathic anemia, renal anemia and anemia accompanying a tumor), infection or inflammatory diseases (e.g., HIV infection, rheumatoid arthritis), operation-related states of ischemia and consecutive symptoms, protracted ischemia states of the brain, cancer and an impairment in the state of health occurring in the course of treatment of cancer, autoimmune disease, accelerating wound healing and diabetes.

[0315] It is understood that the siNA molecules of the invention can degrade the target PHD2 mRNA (and thus inhibit the diseases stated above). Inhibition of a disease can be evaluated by directly measuring the progress of the disease in a subject. It can also be inferred through observing a change or reversal in a condition associated with the disease. Additionally, the siNA molecules of the invention can be used as a prophylaxis. Thus, the use of the nucleic acid molecules and pharmaceutical compositions of the invention can be used to ameliorate, treat, prevent, and/or cure these diseases and others associated with regulation of PHD2 gene expression.

### 2. Pharmaceutical Compositions

[0316] The siNA molecules of the instant invention provide useful reagents and methods for a variety of therapeutic, prophylactic, cosmetic, veterinary, diagnostic, target validation, genomic discovery, genetic engineering, and pharmacogenomic applications.

a. Formulations

[0317] Thus, the present invention, in one aspect, also provides for pharmaceutical compositions of the siNA molecules described, i.e., compositions in a pharmaceutically acceptable carrier or diluent. These pharmaceutical compositions include salts, esters, or salts of such esters, of the above compounds, e.g., acid addition salts, for example, salts of hydrochloric, hydrobromic, hydroiodic, acetic acid, and benzene sulfonic acid. Other salts include for example, sodium, potassium, manganese, ammonium, and calcium salts. These formulations or compositions can comprise a pharmaceutically acceptable carrier or diluent as is generally known in the art.

[0318] In one embodiment, the invention features a pharmaceutical composition comprising an siNA molecule comprising at least a 15 nucleotide sequence of SEQ ID NO: 1. In another embodiment, the invention features a pharmaceutical composition comprising an siNA molecule comprising at least a 15 nucleotide sequence of SEQ ID NO: 880. In yet another embodiment, the invention features a pharmaceutical composition comprising an siNA molecule comprising at least a 15 nucleotide sequence of SEQ ID NO: 2. In still another embodiment, the invention features a pharmaceutical composition comprising an siNA molecule comprising at least a 15 nucleotide sequence of SEQ ID NO: 881. In another embodiment, the invention features a pharmaceutical composition comprising an siNA molecule comprising at least a 15 nucleotide sequence of SEQ ID NO: 3. In another embodiment, the invention features a pharmaceutical composition comprising an siNA molecule comprising at least a 15 nucleotide sequence of SEQ ID NO: 882. In another embodiment, the invention features a pharmaceutical composition comprising an siNA molecule comprising at least a 15 nucleotide sequence of SEQ ID NO: 4. In yet another embodiment, the invention features a pharmaceutical composition comprising an siNA molecule comprising at least a 15 nucleotide sequence of SEQ ID NO: 883. In one embodiment, the invention features a pharmaceutical composition comprising an siNA molecule comprising at least a 15 nucleotide sequence of SEQ ID NO: 5. In another embodiment, the invention features a pharmaceutical composition comprising an siNA molecule comprising at least a 15 nucleotide sequence of SEQ ID NO: 884. In yet another embodiment, the invention features a pharmaceutical composition comprising an siNA molecule comprising at least a 15 nucleotide sequence of SEQ ID NO: 6. In still another embodiment, the invention features a pharmaceutical composition comprising an siNA molecule comprising at least a 15 nucleotide sequence of SEQ ID NO: 885. In another embodiment, the invention features a pharmaceutical composition comprising an siNA molecule comprising at least a 15 nucleotide sequence of SEQ ID NO: 7. In another embodiment, the invention features a pharmaceutical composition comprising an siNA molecule comprising at least a 15 nucleotide sequence of SEQ ID NO: 886. In another embodiment, the invention features a pharmaceutical composition comprising an siNA molecule comprising at least a 15 nucleotide sequence of SEQ ID NO: 8. In yet another embodiment, the invention features a pharmaceutical composition comprising an siNA molecule comprising at least a 15 nucleotide sequence of SEQ ID NO: 887. In one embodiment, the invention features a pharmaceutical composition comprising an siNA molecule comprising at least a 15 nucleotide sequence of SEQ ID NO: 9. In another embodiment, the invention features a pharmaceutical composition comprising an siNA molecule comprising at least a 15 nucleotide sequence of SEQ ID NO: 888. In yet another embodiment, the invention features a pharmaceutical composition comprising an siNA molecule comprising at least a 15 nucleotide sequence of SEQ ID NO: 10. In still another embodiment, the invention features a pharmaceutical composition comprising an siNA molecule comprising at least a 15 nucleotide sequence of SEQ ID NO: 889. In another embodiment, the invention features a pharmaceutical composition comprising an siNA molecule comprising at least a 15 nucleotide sequence of SEQ ID NO: 11. In another embodiment, the invention features a pharmaceutical composition comprising an siNA molecule comprising at least a 15 nucleotide sequence of SEQ ID NO: 890. In another embodiment, the invention features a pharmaceutical composition comprising an siNA molecule comprising at least a 15 nucleotide sequence of SEQ ID NO: 13. In yet another embodiment, the invention features a pharmaceutical composition comprising an siNA molecule comprising at least a 15 nucleotide sequence of SEQ ID NO: 892. In another embodiment, the invention features a pharmaceutical composition comprising an siNA molecule comprising at least a 15 nucleotide sequence of SEQ ID NO: 25. In yet another embodiment, the invention features a pharmaceutical composition comprising an siNA molecule comprising at least a 15 nucleotide sequence of SEQ ID NO: 904. In yet another embodiment, the invention features a pharmaceutical composition comprising an siNA molecule comprising at least a 15 nucleotide sequence of SEQ ID NO: 33. In still another embodiment, the invention features a pharmaceutical composition comprising an siNA molecule comprising at least a 15 nucleotide sequence of SEQ ID NO: 912. In one embodiment, the invention features a pharmaceutical composition comprising an siNA molecule comprising at least a 15 nucleotide sequence of SEQ ID NO: 46. In another embodiment, the invention features a pharmaceutical composition comprising an siNA molecule comprising at least a 15 nucleotide sequence of SEQ ID NO: 925. In yet another embodiment, the invention features a pharmaceutical composition comprising an siNA molecule comprising at least a 15 nucleotide sequence of SEQ ID NO: 52. In still another embodiment, the invention features a pharmaceutical composition comprising an siNA molecule comprising at least a 15 nucleotide sequence of SEQ ID NO: 931. In another embodiment, the invention features a pharmaceutical composition comprising an siNA molecule comprising at least a 15 nucleotide sequence of SEQ ID NO: 54. In another embodiment, the invention features a pharmaceutical composition comprising an siNA molecule comprising at least a 15 nucleotide sequence of SEQ ID NO: 933. In another embodiment, the invention features a pharmaceutical composition comprising an siNA molecule comprising at least a 15 nucleotide sequence of SEQ ID NO: 79. In yet another embodiment, the invention features a pharmaceutical composition comprising an siNA molecule comprising at least a 15 nucleotide sequence of SEQ ID NO: 958. In still another embodiment, the invention features a pharmaceutical composition comprising an siNA molecule comprising formula (A).

[0319] The siNA molecules of the invention are preferably formulated as pharmaceutical compositions prior to administering to a subject, according to techniques known in the art. Pharmaceutical compositions of the present invention are characterized as being at least sterile and pyrogen-free. Methods for preparing pharmaceutical compositions of the invention are within the skill in the art for example as described in Remington's Pharmaceutical Science, 17^{th} ed., Mack Publishing Company, Easton, Pa. (1985).

[0320] In some embodiments, pharmaceutical compositions of the invention (e.g. siNA and/or LNP formulations thereof) further comprise conventional pharmaceutical excipients and/or additives. Suitable pharmaceutical excipients include preservatives, flavoring agents, stabilizers, antioxidants, osmolality adjusting agents, buffers, and pH adjusting agents. Suitable additives include physiologically biocompatible buffers (e.g., trimethylamine hydrochloride), addition of chelants (such as, for example, DTPA or DTPA-bisamide) or calcium chelate complexes (as for example calcium DTPA, CaNaDTPA-bisamide), or, optionally, additions of calcium or sodium salts (for example, calcium chloride, calcium ascorbate, calcium gluconate or calcium lactate). In addition, antioxidants and suspending agents can be used.

[0321] Non-limiting examples of various types of formulations for local administration include ointments, lotions, creams, gels, foams, preparations for delivery by transdermal patches, powders, sprays, aerosols, capsules or cartridges for use in an inhaler or insufflator or drops (for example eye or nose drops), solutions/suspensions for nebulization, suppositories, pessaries, retention enemas and chewable or suckable tablets or pellets (for example for the treatment of aphthous ulcers) or liposome or microencapsulation preparations.

[0322] Ointments, creams and gels, can, for example, can be formulated with an aqueous or oily base with the addition of suitable thickening and/or gelling agent and/or solvents. Non limiting examples of such bases can thus, for example, include water and/or an oil such as liquid paraffin or a vegetable oil such as arachis oil or castor oil, or a solvent such as polyethylene glycol. Various thickening agents and gelling agents can be used depending on the nature of the base, Non-limiting examples of such agents include soft paraffin, aluminum stearate, cetostearyl alcohol, polyethylene glycols, woolfat, beeswax, carboxypolymethylene and cellulose derivatives, and/or glyceryl monostearate and/or non-ionic emulsifying agents.

[0323] In one embodiment lotions can be formulated with an aqueous or oily base and will in general also contain one or more emulsifying agents, stabilizing agents, dispersing agents, suspending agents or thickening agents.

[0324] In one embodiment powders for external application can be formed with the aid of any suitable powder base, for example, talc, lactose or starch. Drops can be formulated with an aqueous or non-aqueous base also comprising one or more dispersing agents, solubilizing agents, suspending agents or preservatives.

[0325] Compositions intended for oral use can be prepared according to any method known to the art for the manufacture of pharmaceutical compositions and such compositions can contain one or more such sweetening agents, flavoring agents, coloring agents or preservative agents in order to provide pharmaceutically elegant and palatable preparations. Tablets contain the active ingredient in admixture with non-toxic pharmaceutically acceptable excipients that are suitable for the manufacture of tablets. These excipients can be, for example, inert diluents; such as calcium carbonate, sodium carbonate, lactose, calcium phosphate or sodium phosphate; granulating and disintegrating agents, for example, corn starch, or alginic acid; binding agents, for example starch, gelatin or acacia; and lubricating agents, for example magnesium stearate, stearic acid or talc. The tablets can be uncoated or they can be coated by known techniques. In some cases such coatings can be prepared by known techniques to delay disintegration and absorption in the gastrointestinal tract and thereby provide a sustained action over a longer period. For example, a time delay material such as glyceryl monosterate or glyceryl distearate can be employed.

[0326] Formulations for oral use can also be presented as hard gelatin capsules wherein the active ingredient is mixed with an inert solid diluent, for example, calcium carbonate, calcium phosphate or kaolin, or as soft gelatin capsules wherein the active ingredient is mixed with water or an oil medium, for example peanut oil, liquid paraffin or olive oil.

[0327] Aqueous suspensions contain the active materials in a mixture with excipients suitable for the manufacture of aqueous suspensions. Such excipients are suspending agents, for example sodium carboxymethylcellulose, methylcellulose, hydropropyl-methylcellulose, sodium alginate, polyvinylpyrrolidone, gum tragacanth and gum acacia; dispersing or wetting agents can be a naturally-occurring phosphatide, for example, lecithin, or condensation products of an alkylene oxide with fatty acids, for example polyoxyethylene stearate; or condensation products of ethylene oxide with long chain aliphatic alcohols, for example heptadecaethyleneoxycetanol, or condensation products of ethylene oxide with partial esters derived from fatty acids and a hexitol such as polyoxyethylene sorbitol monooleate, or condensation products of ethylene oxide with partial esters derived from fatty acids and hexitol anhydrides, for example polyethylene sorbitan monooleate. The aqueous suspensions can also contain one or more preservatives, for example ethyl, or n-propyl p-hydroxybenzoate, one or more coloring agents, one or more flavoring agents, and one or more sweetening agents, such as sucrose or saccharin.

[0328] Oily suspensions can be formulated by suspending the active ingredients in a vegetable oil, for example arachis oil, olive oil, sesame oil or coconut oil, or in a mineral oil such as liquid paraffin. The oily suspensions can contain a thickening agent, for example beeswax, hard paraffin or cetyl alcohol. Sweetening agents and flavoring agents can be added to provide palatable oral preparations. These compositions can be preserved by the addition of an anti-oxidant such as ascorbic acid

[0329] Pharmaceutical compositions of the invention can also be in the form of oil-in-water emulsions. The oily phase can be a vegetable oil or a mineral oil or mixtures of these. Suitable emulsifying agents can be naturally-occurring gums, for example gum acacia or gum tragacanth, naturally-occurring phosphatides, for example soy bean, lecithin, and esters or partial esters derived from fatty acids and hexitol, anhydrides, for example sorbitan monooleate, and condensation products of the said partial esters with ethylene oxide, for example polyoxyethylene sorbitan monooleate. The emulsions can also contain sweetening and flavoring agents.

[0330] Syrups and elixirs can be formulated with sweetening agents, for example glycerol, propylene glycol, sorbitol, glucose or sucrose. Such formulations can also contain a demulcent, a preservative and flavoring and coloring agents. The pharmaceutical compositions can be in the form of a sterile injectable aqueous or oleaginous suspension. This suspension can be formulated according to the known art using those suitable dispersing or wetting agents and suspending agents that have been mentioned above. The sterile injectable preparation can also be a sterile injectable solution or suspension in a non-toxic parentally acceptable diluent or solvent, for example as a solution in 1,3-butanediol. Among the acceptable vehicles and solvents that can be employed are water, Ringer's solution and isotonic sodium chloride solution. In addition, sterile, fixed oils are conventionally employed as a solvent or suspending medium. For this purpose, any bland fixed oil can be employed including synthetic mono- or diglycerides. In addition, fatty acids such as oleic acid find use in the preparation of injectables.

[0331] The nucleic acid molecules of the invention can also be administered in the form of suppositories, e.g., for rectal administration of the drug. These compositions can be prepared by mixing the drug with a suitable non-irritating excipient that is solid at ordinary temperatures but liquid at the rectal temperature and will therefore melt in the rectum to release the drug. Such materials include cocoa butter and polyethylene glycols.

[0332] Nucleic acid molecules of the invention can be administered parenterally in a sterile medium. The drug, depending on the vehicle and concentration used, can either be suspended or dissolved in the vehicle. Advantageously, adjuvants such as local anesthetics, preservatives and buffering agents can be dissolved in the vehicle.

[0333] In other embodiments, the siNA and LNP compositions and formulations provided herein for use in pulmonary delivery further comprise one or more surfactants. Suitable surfactants or surfactant components for enhancing the uptake of the compositions of the invention include synthetic and natural as well as full and truncated forms of surfactant protein A, surfactant protein B, surfactant protein C, surfactant protein D and surfactant Protein E, di-saturated phosphatidylcholine (other than dipalmitoyl), dipalmitoylphosphatidylcholine, phosphatidylcholine, phosphatidylglycerol, phosphatidylinositol, phosphatidylethanolamine, phosphatidylserine; phosphatidic acid, ubiquinones, lysophosphatidylethanolamine, lysophosphatidylcholine, palmitoyl-lysophosphatidylcholine, dehydroepiandrosterone, dolichols, sulfatidic acid, glycerol-3-phosphate, dihydroxyacetone phosphate, glycerol, glycero-3-phosphocholine, dihydroxyacetone, palmitate, cytidine diphosphate (CDP) diacylglycerol, CDP choline, choline, choline phosphate; as well as natural and artificial lamellar bodies which are the natural carrier vehicles for the components of surfactant, omega-3 fatty acids, polyenic acid, polyenoic acid, lecithin, palmitinic acid, non-ionic block copolymers of ethylene or propylene oxides, polyoxypropylene, monomeric and polymeric, polyoxyethylene, monomeric and polymeric, poly (vinyl amine) with dextran and/or alkanoyl side chains, Brij 35, Triton X-100 and synthetic surfactants ALEC, Exosurf, Survan and Atovaquone, among others. These surfactants can be used either as single or part of a multiple component surfactant in a formulation, or as covalently bound additions to the 5′ and/or 3′ ends of the nucleic acid component of a pharmaceutical composition herein.

b. Combinations

[0334] The siNAs and pharmaceutical formulations according to the invention can be administered to a subject alone or used in combination with or include one or more other therapeutic agents, that are used in the treatment/prevention/suppression or amelioration of the diseases or conditions for which the siNA molecules of the invention are useful e.g., therapeutics for treating blood formation disorders, cardiovascular diseases, infection or inflammatory disease, cancer, etc.

[0335] Such other drugs may be administered, by a route and in an amount commonly used therefor, contemporaneously or sequentially with a siNA molecule of the invention. When an siNA molecule is used contemporaneously with one or more other drugs, a pharmaceutical composition containing such other drugs in addition to the siNA molecule is preferred. Accordingly, the pharmaceutical compositions of the present invention include those that also contain one or more other active ingredients, in addition to an siNA molecule.

[0336] In a further embodiment, therefore, the invention provides a combination comprising an siNA molecule of the invention, such as for example, but not limitation, an siNA molecule comprising at least a 15 nucleotide sequence of SEQ ID NO: 1, SEQ ID NO: 880, SEQ ID NO: 2, SEQ ID NO: 881, SEQ ID NO: 3, SEQ ID NO: 882, SEQ ID NO: 4, SEQ ID NO: 883, SEQ ID NO: 5, SEQ ID NO: 884, SEQ ID NO: 6, SEQ ID NO: 885, SEQ ID NO: 7, SEQ ID NO: 886, SEQ ID NO: 8, SEQ ID NO: 887, SEQ ID NO: 9, SEQ ID NO: 888, SEQ ID NO: 10, SEQ ID NO: 889, SEQ ID NO: 11, SEQ ID NO: 890, SEQ ID NO: 13, SEQ ID NO: 892, SEQ ID NO: 25, SEQ ID NO: 904, SEQ ID NO: 33, SEQ ID NO: 912, SEQ ID NO: 46, SEQ ID NO: 925, SEQ ID NO: 52, SEQ ID NO: 931, SEQ ID NO: 54, SEQ ID NO: 933, SEQ ID NO: 79, or SEQ ID NO: 958; or formula (A) or a pharmaceutically acceptable salt, solvate or physiologically functional derivative thereof together with one or more therapeutic agents that can be used to treat a disease associated with PHD2.

[0337] In one embodiment, the siNAs of the invention are useful in combination with any therapeutic agent used in the treatment of anemia. Such an anemia treatment agent is, for example, a continuous eythropoiesis receptor activator (such as epoetin alfa).

[0338] A compound of the instant invention may also be useful for treating or preventing anenia in combination with other siNA therapeutics.

[0339] The invention also provides a combination comprising an siNA molecule of the invention comprising at least a 15 nucleotide sequence of SEQ ID NO: 1, SEQ ID NO: 880, SEQ ID NO: 2, SEQ ID NO: 881, SEQ ID NO: 3, SEQ ID NO: 882, SEQ ID NO: 4, SEQ ID NO: 883, SEQ ID NO: 5, SEQ ID NO: 884, SEQ ID NO: 6, SEQ ID NO: 885, SEQ ID NO: 7, SEQ ID NO: 886, SEQ ID NO: 8, SEQ ID NO: 887, SEQ ID NO: 9, SEQ ID NO: 888, SEQ ID NO: 10, SEQ ID NO: 889, SEQ ID NO: 11, SEQ ID NO: 890, SEQ ID NO: 13, SEQ ID NO: 892, SEQ ID NO: 25, SEQ ID NO: 904, SEQ ID NO: 33, SEQ ID NO: 912, SEQ ID NO: 46, SEQ ID NO: 925, SEQ ID NO: 52, SEQ ID NO: 931, SEQ ID NO: 54, SEQ ID NO: 933, SEQ ID NO: 79, or SEQ ID NO: 958; or formula (A) and/or a pharmaceutically acceptable salt, solvate or physiologically functional derivative thereof together with another PHD2 inhibitor.

[0340] The combinations referred to above can conveniently be presented for use in the form of a pharmaceutical formulation and thus pharmaceutical compositions comprising a combination as defined above together with a pharmaceutically acceptable diluent or carrier represent a further aspect of the invention.

[0341] The individual compounds of such combinations can be administered either sequentially or simultaneously in separate or combined pharmaceutical formulations. In one embodiment, the individual compounds will be administered simultaneously in a combined pharmaceutical formulation.

[0342] Thus, the described molecules could be used in combination with one or more known compounds, treatments, or procedures to prevent or treat diseases, disorders, conditions, and traits described herein in a subject or organism as are known in the art, such as other PHD2 inhibitors.

### 3. Therapeutic Applications

[0343] The present body of knowledge in PHD2 research indicates the need for methods that can regulate PHD2 expression for therapeutic use.

[0344] Thus, one aspect of the invention comprises a method of treating a subject including, but not limited to, a human suffering from a condition which is mediated by the action, or by loss of action, of PHD2 gene expression, which method comprises administering to said subject an effective amount of a double-stranded siNA molecule of the invention. In one embodiment of this aspect, the siNA molecules comprises at least a 15 nucleotide sequence of SEQ ID NO: 1, SEQ ID NO: 880, SEQ ID NO: 2, SEQ ID NO: 881, SEQ ID NO: 3, SEQ ID NO: 882, SEQ ID NO: 4, SEQ ID NO: 883, SEQ ID NO: 5, SEQ ID NO: 884, SEQ ID NO: 6, SEQ ID NO: 885, SEQ ID NO: 7, SEQ ID NO: 886, SEQ ID NO: 8, SEQ ID NO: 887, SEQ ID NO: 9, SEQ ID NO: 888, SEQ ID NO: 10, SEQ ID NO: 889, SEQ ID NO: 11, SEQ ID NO: 890, SEQ ID NO: 13, SEQ ID NO: 892, SEQ ID NO: 25, SEQ ID NO: 904, SEQ ID NO: 33, SEQ ID NO: 912, SEQ ID NO: 46, SEQ ID NO: 925, SEQ ID NO: 52, SEQ ID NO: 931, SEQ ID NO: 54, SEQ ID NO: 933, SEQ ID NO: 79, or SEQ ID NO: 958; or formula (A). In another embodiment of this aspect, the condition is or is caused by anemia. Thus, in certain embodiments the molecules and compositions of the instant invention are useful in a method for treating anemia

[0345] In certain embodiments, the administration of the siNA molecule is via local administration or systemic administration. In other embodiments, the invention features contacting the subject or organism with an siNA molecule of the invention via local administration to relevant tissues or cells, such as lung cells and tissues, such as via pulmonary delivery. In yet other embodiments, the invention features contacting the subject or organism with an siNA molecule of the invention via systemic administration (such as via intravenous or subcutaneous administration of siNA) to relevant tissues or cells.

[0346] siNA molecules of the invention are also used as reagents in ex vivo applications. For example, siNA reagents are introduced into tissue or cells that are transplanted into a subject for therapeutic effect. The cells and/or tissue can be derived from an organism or subject that later receives the explant, or can be derived from another organism or subject prior to transplantation. The siNA molecules can be used to modulate the expression of one or more genes in the cells or tissue, such that the cells or tissue obtain a desired phenotype or are able to perform a function when transplanted in vivo. In one embodiment, certain PHD2 target cells from a patient are extracted. These extracted cells are contacted with PHD2 siNAs targeting a specific nucleotide sequence within the cells under conditions suitable for uptake of the siNAs by these cells (e.g., using delivery reagents such as cationic lipids, liposomes and the like or using techniques such as electroporation to facilitate the delivery of siNAs into cells). The cells are then reintroduced back into the same patient or other patients.

[0347] For therapeutic applications, a pharmaceutically effective dose of the siNA molecules or pharmaceutical compositions of the invention is administered to the subject. A pharmaceutically effective dose is that dose required to prevent, inhibit the occurrence, or treat (alleviate a symptom to some extent, preferably all of the symptoms) a disease state. One skilled in the art can readily determine a therapeutically effective dose of the siNA of the invention to be administered to a given subject, by taking into account factors, such as the size and weight of the subject, the extent of the disease progression or penetration, the age, health, and sex of the subject, the route of administration, and whether the administration is regional or systemic. Generally, an amount between 0.1 μg/kg and 100 mg/kg body weight/day of active ingredients is administered dependent upon potency of the negatively charged polymer. Optimal dosing schedules can be calculated from measurements of drug accumulation in the body of the patient. The siNA molecules of the invention can be administered in a single dose or in multiple doses.

[0348] siNA molecules of the instant invention can be administered once monthly, once weekly, once daily (QD), or divided into multiple monthly, weekly, or daily doses, such as, for example, but not limitation, twice daily (BID), three times daily (TID), once every two weeks. Persons of ordinary skill in the art can easily estimate repetition rates for dosing based on measured residence times and concentrations of the drug in bodily fluids or tissues.

[0349] In addition, the administration can be continuous, i.e., every day, or intermittently. For example, intermittent administration of a compound of the instant invention may be administration one to six days per week or it may mean administration in cycles (e.g. daily administration for two to eight consecutive weeks, then a rest period with no administration for up to one week) or it may mean administration on alternate days.

### G. Administration

[0350] Compositions or formulations can be administered in a variety of ways. Non-limiting examples of administration methods of the invention include oral, buccal, sublingual, parenteral (i.e., intraarticularly, intravenously, intraperitoneally, subcutaneously, or intramuscularly), local rectal administration or other local administration. In one embodiment, the composition of the invention can be administered by insufflation and inhalation. Administration can be accomplished via single or divided doses. In some embodiments, the pharmaceutical compositions are administered intravenously or intraperitoneally by a bolus injection (see, e.g., U.S. Pat. No. 5,286,634). Lipid nucleic acid particles can be administered by direct injection at the site of disease or by injection at a site distal from the site of disease (see, e.g., Culver, HUMAN GENE THERAPY, MaryAnn Liebert, Inc., Publishers, New York. pp. 70-71(1994)). In one embodiment, the siNA molecules of the invention and formulations or compositions thereof are administered to a cell, subject, or organism as is described herein and as is generally known in the art.

### 1. In Vivo Administration

[0351] In any of the methods of treatment of the invention, the siNA can be administered to the subject systemically as described herein or otherwise known in the art, either alone as a monotherapy or in combination with additional therapies described herein or as are known in the art. Systemic administration can include, for example, pulmonary (inhalation, nebulization etc.) intravenous, subcutaneous, intramuscular, catheterization, nasopharangeal, transdermal, or oral/gastrointestinal administration as is generally known in the art.

[0352] In any of the methods of treatment or prevention of the invention, the siNA can be administered to the subject locally or to local tissues as described herein or otherwise known in the art, either alone as a monotherapy or in combination with additional therapies as are known in the art. Local administration can include, for example, inhalation, nebulization, catheterization, implantation, direct injection, dermal/transdermal application, patches, stenting, ear/eye drops, or portal vein administration to relevant tissues, or any other local administration technique, method or procedure, as is generally known in the art.

[0353] In one embodiment, the siNA molecules of the invention and formulations or compositions thereof are administered to the liver as is generally known in the art (see for example Wen et al., 2004, World J Gastroenterol., 10, 244-9; Murao et al., 2002, Pharm Res., 19, 1808-14; Liu et al., 2003, gene Ther., 10, 180-7; Hong et al., 2003, J Pharm Pharmacol., 54, 51-8; Herrmann et al., 2004, Arch Virol., 149, 1611-7; and Matsuno et al., 2003, gene Ther., 10, 1559-66).

[0354] In one embodiment, the invention features the use of methods to deliver the siNA molecules of the instant invention to hematopoietic cells, including monocytes and lymphocytes. These methods are described in detail by Hartmann et al., 1998, J. Phamacol. Exp. Ther., 285(2), 920-928; Kronenwett et al., 1998, Blood, 91(3), 852-862; Filion and Phillips, 1997, Biochim. Biophys. Acta., 1329(2), 345-356; Ma and Wei, 1996, Leuk. Res., 20(11/12), 925-930; and Bongartz et al., 1994, Nucleic Acids Research, 22(22), 4681-8.

[0355] In one embodiment, the siNA molecules of the invention and formulations or compositions thereof are administered directly or topically (e.g., locally) to the dermis or follicles as is generally known in the art (see for example Brand, 2001, Curr. Opin. Mol. Ther., 3, 244-8; Regnier et al., 1998, J. Drug Target, 5, 275-89; Kanikkannan, 2002, BioDrugs, 16, 339-47; Wraight et al., 2001, Pharmacol. Ther., 90, 89-104; and Preat and Dujardin, 2001, STP PharmaSciences, 11, 57-68). In one embodiment, the siNA molecules of the invention and formulations or compositions thereof are administered directly or topically using a hydroalcoholic gel formulation comprising an alcohol (e.g., ethanol or isopropanol), water, and optionally including additional agents such isopropyl myristate and carbomer 980. In other embodiments, the siNA are formulated to be administered topically to the nasal cavity. Topical preparations can be administered by one or more applications per day to the affected area; over skin areas occlusive dressings can advantageously be used. Continuous or prolonged delivery can be achieved by an adhesive reservoir system.

[0356] In one embodiment, an siNA molecule of the invention is administered iontophoretically, for example to a particular organ or compartment (e.g., the eye, back of the eye, heart, liver, kidney, bladder, prostate, tumor, CNS etc.). Non-limiting examples of iontophoretic delivery are described in, for example, WO 03/043689 and WO 03/030989, which are incorporated by reference in their entireties herein.

[0357] In one embodiment, the siNA molecules of the invention and formulations or compositions thereof are administered to the lung as is described herein and as is generally known in the art. In another embodiment, the siNA molecules of the invention and formulations or compositions thereof are administered to lung tissues and cells as is described in U.S. Patent Publication Nos. 2006/0062758; 2006/0014289; and 2004/0077540.

### 2. Aerosols and Delivery Devices

a. Aerosol Formulations

[0358] The compositions of the present invention, either alone or in combination with other suitable components, can be made into aerosol formulations (i.e., they can be “nebulized”) to be administered via inhalation (e.g., intranasally or intratracheally) (see, Brigham et al., Am. J. Sci., 298:278 (1989)). Aerosol formulations can be placed into pressurized acceptable propellants, such as dichlorodifluoromethane, propane, nitrogen, and the like.

[0359] In one embodiment, the siNA molecules of the invention and formulations thereof are administered via pulmonary delivery, such as by inhalation of an aerosol or spray dried formulation administered by an inhalation device or nebulizer, providing rapid local uptake of the nucleic acid molecules into relevant pulmonary tissues. Solid particulate compositions containing respirable dry particles of micronized nucleic acid compositions can be prepared by grinding dried or lyophilized nucleic acid compositions, and then passing the micronized composition through, for example, a 400 mesh screen to break up or separate out large agglomerates. A solid particulate composition comprising the siNA compositions of the invention can optionally contain a dispersant which serves to facilitate the formation of an aerosol as well as other therapeutic compounds. A suitable dispersant is lactose, which can be blended with the nucleic acid compound in any suitable ratio, such as a 1 to 1 ratio by weight.

[0360] Spray compositions comprising siNA molecules or compositions of the invention can, for example, be formulated as aqueous solutions or suspensions or as aerosols delivered from pressurized packs, such as a metered dose inhaler, with the use of a suitable liquefied propellant. In one embodiment, aerosol compositions of the invention suitable for inhalation can be either a suspension or a solution and generally contain an siNA molecule comprising at least a 15 nucleotide sequence of SEQ ID NO: 1, SEQ ID NO: 880, SEQ ID NO: 2, SEQ ID NO: 881, SEQ ID NO: 3, SEQ ID NO: 882, SEQ ID NO: 4, SEQ ID NO: 883, SEQ ID NO: 5, SEQ ID NO: 884, SEQ ID NO: 6, SEQ ID NO: 885, SEQ ID NO: 7, SEQ ID NO: 886, SEQ ID NO: 8, SEQ ID NO: 887, SEQ ID NO: 9, SEQ ID NO: 888, SEQ ID NO: 10, SEQ ID NO: 889, SEQ ID NO: 11, SEQ ID NO: 890, SEQ ID NO: 13, SEQ ID NO: 892, SEQ ID NO: 25, SEQ ID NO: 904, SEQ ID NO: 33, SEQ ID NO: 912, SEQ ID NO: 46, SEQ ID NO: 925, SEQ ID NO: 52, SEQ ID NO: 931, SEQ ID NO: 54, SEQ ID NO: 933, SEQ ID NO: 79, or SEQ ID NO: 958; or formula (A), and a suitable propellant such as a fluorocarbon or hydrogen-containing chlorofluorocarbon or mixtures thereof, particularly hydrofluoroalkanes, especially 1,1,1,2-tetrafluoroethane, 1,1,1,2,3,3,3-heptafluoro-n-propane or a mixture thereof. The aerosol composition can optionally contain additional formulation excipients well known in the art such as surfactants. Non-limiting examples include oleic acid, lecithin or an oligolactic acid or derivative such as those described in WO94/21229 and WO98/34596 and co-solvents for example ethanol. In one embodiment a pharmaceutical aerosol formulation of the invention comprising a compound of the invention and a fluorocarbon or hydrogen-containing chlorofluorocarbon or mixtures thereof as propellant, optionally in combination with a surfactant and/or a co-solvent.

[0361] The aerosol formulations of the invention can be buffered by the addition of suitable buffering agents.

[0362] Aerosol formulations can include optional additives including preservatives if the formulation is not prepared sterile. Non-limiting examples include, methyl hydroxybenzoate, anti-oxidants, flavorings, volatile oils, buffering agents and emulsifiers and other formulation surfactants. In one embodiment, fluorocarbon or perfluorocarbon carriers are used to reduce degradation and provide safer biocompatible non-liquid particulate suspension compositions of the invention (e.g., siNA and/or LNP formulations thereof). In another embodiment, a device comprising a nebulizer delivers a composition of the invention (e.g., siNA and/or LNP formulations thereof) comprising fluorochemicals that are bacteriostatic thereby decreasing the potential for microbial growth in compatible devices.

[0363] Capsules and cartridges comprising the composition of the invention for use in an inhaler or insufflator, of for example gelatine, can be formulated containing a powder mix for inhalation of a compound of the invention and a suitable powder base such as lactose or starch. In one embodiment, each capsule or cartridge contains an siNA molecule comprising at least a 15 nucleotide sequence of SEQ ID NO: 1, SEQ ID NO: 880, SEQ ID NO: 2, SEQ ID NO: 881, SEQ ID NO: 3, SEQ ID NO: 882, SEQ ID NO: 4, SEQ ID NO: 883, SEQ ID NO: 5, SEQ ID NO: 884, SEQ ID NO: 6, SEQ ID NO: 885, SEQ ID NO: 7, SEQ ID NO: 886, SEQ ID NO: 8, SEQ ID NO: 887, SEQ ID NO: 9, SEQ ID NO: 888, SEQ ID NO: 10, SEQ ID NO: 889, SEQ ID NO: 11, SEQ ID NO: 890, SEQ ID NO: 13, SEQ ID NO: 892, SEQ ID NO: 25, SEQ ID NO: 904, SEQ ID NO: 33, SEQ ID NO: 912, SEQ ID NO: 46, SEQ ID NO: 925, SEQ ID NO: 52, SEQ ID NO: 931, SEQ ID NO: 54, SEQ ID NO: 933, SEQ ID NO: 79, or SEQ ID NO: 958; or formula (A), and one or more excipients. In another embodiment, the compound of the invention can be presented without excipients such as lactose.

[0364] The aerosol compositions of the present invention can be administered into the respiratory system as a formulation including particles of respirable size, e.g. particles of a size sufficiently small to pass through the nose, mouth and larynx upon inhalation and through the bronchi and alveoli of the lungs. In general, respirable particles range from about 0.5 to 10 microns in size. In one embodiment, the particulate range can be from 1 to 5 microns. In another embodiment, the particulate range can be from 2 to 3 microns. Particles of non-respirable size which are included in the aerosol tend to deposit in the throat and be swallowed, and the quantity of non-respirable particles in the aerosol is thus minimized. For nasal administration, a particle size in the range of 10-500 um is preferred to ensure retention in the nasal cavity.

[0365] In some embodiments, an siNA composition of the invention is administered topically to the nose for example, for the treatment of rhinitis, via pressurized aerosol formulations, aqueous formulations administered to the nose by pressurized pump or by nebulization. Suitable formulations contain water as the diluent or carrier for this purpose. In certain embodiments, the aqueous formulations for administration of the composition of the invention to the lung or nose can be provided with conventional excipients such as buffering agents, tonicity modifying agents and the like.

b. Devices

[0366] The siNA molecules of the invention can be formulated and delivered as particles and/or aerosols as discussed above and dispensed from various aerosolization devices known by those of skill in the art.

[0367] Aerosols of liquid or non-liquid particles comprising an siNA molecule or formulation of the invention can be produced by any suitable means, such as with a device comprising a nebulizer (see for example U.S. Pat. No. 4,501,729) such as ultrasonic or air jet nebulizers.

[0368] Solid particle aerosols comprising an siNA molecule or formulation of the invention and surfactant can be produced with any solid particulate aerosol generator. One type of solid particle aerosol generator used with the siNA molecules of the invention is an insufflator. A second type of illustrative aerosol generator comprises a metered dose inhaler (“MDI”). MDIs containing siNA molecules or formulations taught herein can be prepared by methods of the art (for example, see Byron, above and WO96/32099).

[0369] The siNA molecules can also be formulated as a fluid formulation for delivery from a fluid dispenser, such as those described and illustrated in WO05/044354.

[0370] In certain embodiments of the invention, nebulizer devices are used in applications for conscious, spontaneously breathing subjects, and for controlled ventilated subjects of all ages. The nebulizer devices can be used for targeted topical and systemic drug delivery to the lung. In one embodiment, a device comprising a nebulizer is used to deliver an siNA molecule or formulation of the invention locally to lung or pulmonary tissues. In another embodiment, a device comprising a nebulizer is used to deliver a an siNA molecule or formulation of the invention systemically.

### H. Other Applications/Uses of siNA Molecules of the Invention

[0371] The siNA molecules of the invention can also be used for diagnostic applications, research applications, and/or manufacture of medicants.

[0372] In one aspect, the invention features a method for diagnosing a disease, trait, or condition in a subject comprising administering to the subject a composition of the invention under conditions suitable for the diagnosis of the disease, trait, or condition in the subject.

[0373] Compounds of the invention can be used in a selective and controlled manner to induce hypoxia-inducible factor stabilization and to rapidly and reversibly stimulate erythropoietin production and secretion. Accordingly, in one aspect of the present invention provides a method of treating or preventing a disease or condition in a mammal, the treatment or prevention of which is effected or facilitated by HIF prolyl hydroxylase inhibition, which comprises administering an amount of siNA molecule that is effective for inhibiting HIF prolyl hydroxylase.

[0374] In one embodiment, siNA molecules of the invention are used to down regulate or inhibit the expression of PHD2 proteins arising from haplotype polymorphisms that are associated with a trait, disease or condition in a subject or organism. Analysis of PHD2 genes, or PHD2 protein or RNA levels can be used to identify subjects with such polymorphisms or those subjects who are at risk of developing traits, conditions, or diseases described herein. These subjects are amenable to treatment, for example, treatment with siNA molecules of the invention and any other composition useful in treating diseases related to target gene expression. As such, analysis of PHD2 protein or RNA levels can be used to determine treatment type and the course of therapy in treating a subject. Monitoring of PHD2 protein or RNA levels can be used to predict treatment outcome and to determine the efficacy of compounds and compositions that modulate the level and/or activity of certain PHD2 proteins associated with a trait, disorder, condition, or disease.

[0375] In another embodiment, the invention comprises use of a double-stranded nucleic acid according to the invention for use in the manufacture of a medicament for the treatment or prevention of a disease or condition modulated by PHD2. In an embodiment, the medicament is for use in treating a condition that is mediated by the action, or by loss of action, of PHD2. In an embodiment the medicant is used for the treatment or prevention of cardiovascular diseases (e.g., cardiac insufficiency, coronary heart disease, angina pectoris, myocardial infarction, stroke, atherosclerosis, pulmonary and malignant hypertension and peripheral aterial occlusive disease), blood formation disorders (e.g., idiopathic anemia, renal anemia and anemia accompanying a tumor), infection or inflammatory diseases (e.g., HIV infection, rheumatoid arthritis), operation-related states of ischemia and consecutive symptoms, protracted ischemia states of the brain, cancer and an impairment in the state of health occurring in the course of treatment of cancer, autoimmune disease, accelerating wound healing and diabetes. In a particularly preferred embodiment, the medicament is for use for the treatment of anemia.

[0376] In certain embodiments, siNAs wherein at least one strand comprises at least a 15 nucleotide sequence of SEQ ID NO: 1, SEQ ID NO: 880, SEQ ID NO: 2, SEQ ID NO: 881, SEQ ID NO: 3, SEQ ID NO: 882, SEQ ID NO: 4, SEQ ID NO: 883, SEQ ID NO: 5, SEQ ID NO: 884, SEQ ID NO: 6, SEQ ID NO: 885, SEQ ID NO: 7, SEQ ID NO: 886, SEQ ID NO: 8, SEQ ID NO: 887, SEQ ID NO: 9, SEQ ID NO: 888, SEQ ID NO: 10, SEQ ID NO: 889, SEQ ID NO: 11, SEQ ID NO: 890, SEQ ID NO: 13, SEQ ID NO: 892, SEQ ID NO: 25, SEQ ID NO: 904, SEQ ID NO: 33, SEQ ID NO: 912, SEQ ID NO: 46, SEQ ID NO: 925, SEQ ID NO: 52, SEQ ID NO: 931, SEQ ID NO: 54, SEQ ID NO: 933, SEQ ID NO: 79, or SEQ ID NO: 958; or formula (A), are for use in a method for treating a anemia.

### I. Examples

[0377] The invention will now be illustrated with the following non-limiting examples. Those of skill in the art will readily recognize a variety of non-critical parameters which can be changed or modified to yield essentially the same results.

### Example 1: Design, Synthesis, and Identification of siNAs Active Against PHD2. PHD2 siNA Synthesis

[0378] A series of siNA molecules were designed, synthesized and evaluated for efficacy against PHD2 gene expression. Certain PHD2 sequences were designed and selected by methods set forth in U.S. Application No. 60/182,605, which is incorporated by reference for purposes of designing and selecting siNAs. Other sequences were designed and selected using a proprietary algorithm. The primary criteria for design of certain of the PHD2 sequences for human siNAs were (i) homology between species (human only, human and rhesus monkey, or human and rat, or human and mouse, or human and rat and mouse, or human rhesus monkey and mouse) and (ii) high efficacy scores as determined by a proprietary algorithm. The effects of the siNAs on PHD2 RNA levels. The target sequences of the siNAs that were selected are set forth in Table 1a (target sequences). The sense and antisense strands of the siNA sequences corresponding to the target sequences in Table 1a are set forth in Table 1b. Various chemically modified siNAs that were designed and/or synthesized are set forth in Table 1c.

TABLE 1a
PHD Target Sequences, noting human target
sites.

| | Target Site | SEQ ID NO: |
|---|---|---|
| Target Sequence | (human) | 1 |
| GAUGUGUGACAUGUAUAUA | 962 | 1 |
| GUUAUGUACGUCAUGUUGA | 923 | 2 |
| GUCAUGUUGAUAAUCCAAA | 932 | 3 |
| GUGUGACAUGUAUAUAUUA | 965 | 4 |
| UGUUGAUAAUCCAAAUGGA | 936 | 5 |
| AACGGGUUAUGUACGUCAU | 918 | 6 |
| GAUGGAAGAUGUGUGACAU | 955 | 7 |
| UGUGUGACAUGUAUAUAUU | 964 | 8 |
| GGAAGAUGUGUGACAUGUA | 958 | 9 |
| CAUGUAUAUAUUAUCUUAA | 971 | 10 |
| UUGAUAAUCCAAAUGGAGA | 938 | 11 |
| ACGUCAUGUUGAUAAUCCA | 930 | 12 |
| UGGAAGAUGUGUGACAUGU | 957 | 13 |
| AAGCCAUGGUUGCUUGUUA | 887 | 14 |
| CAAUGGAACGGGUUAUGUA | 912 | 15 |
| GACGUCUUCUAGAGCCUUU | 1267 | 16 |
| GACAUGUAUAUAUUAUCUU | 969 | 17 |
| GUCGCAACCCUCAUGAAGU | 1106 | 18 |
| UACGUCAUGUUGAUAAUCC | 929 | 19 |
| GGGUUAUGUACGUCAUGUU | 921 | 20 |
| GUUGAACUCAAUAAACCUU | 4390 | 21 |
| GAAGAUGUGUGACAUGUAU | 959 | 22 |
| ACGAAAGCCAUGGUUGCUU | 4042 | 23 |
| UGUAUAUAUUAUCUUAAUA | 973 | 24 |
| GCAAUAACUGUUUGGUAUU | 284 | 25 |
| UGCUGACAUUGAACCCAAA | 1056 | 26 |
| CGAAAGCCAUGGUUGCUUG | 4043 | 27 |
| UGGAGGUAUACUUCGAAUU | 1014 | 28 |
| CGGGCAAUGGAACGGGUUA | 908 | 29 |
| AGCCAUGGUUGCUUGUUAU | 888 | 30 |
| UCGCAACCCUCAUGAAGUA | 1107 | 31 |
| AGCCUUUGAUCCAGCAAUA | 4438 | 32 |
| CAUUGAACCCAAAUUUGAU | 196 | 33 |
| GACUGGGAUGCCAAGGUAA | 994 | 34 |
| GUAUUUUGAUGCAGAUGAG | 4323 | 35 |
| UUGCUGACAUUGAACCCAA | 1055 | 36 |
| GUGUGAGGGUUGAACUCAA | 1223 | 37 |
| CGGGUUAUGUACGUCAUGU | 920 | 38 |
| CGUCAUGUUGAUAAUCCAA | 931 | 39 |
| GUGACUUUGUACUGCAUGA | 4604 | 40 |
| AAGGUAAGUGGAGGUAUAC | 1006 | 41 |
| GCUACAAGGUACGCAAUAA | 4297 | 42 |
| AAGGUGUGAGGGUUGAACU | 4379 | 43 |
| CAAGUUUGAAUUUGGGAUA | 4790 | 44 |
| GCAACCCUCAUGAAGUACA | 4268 | 45 |
| AACCCAAAUUUGAUAGACU | 4226 | 46 |
| CGCAAUAACUGUUUGGUAU | 4308 | 47 |
| GAUGAGAGAGCACGAGCUA | 4336 | 48 |
| UUAUGUACGUCAUGUUGAU | 924 | 49 |
| GAGAGCACGAGCUAAAGUA | 4341 | 50 |
| CUCAUGAAGUACAACCAGC | 1115 | 51 |
| AUGCUACAAGGUACGCAAU | 4295 | 52 |
| CUGACAUUGAACCCAAAUU | 4217 | 53 |
| AGCCCAGUUUGCUGACAUU | 4206 | 54 |
| GCCCAGUUUGCUGACAUUG | 1048 | 55 |
| GCCCGGCUGCGAAACCAUU | 786 | 56 |
| GGUACAAUUUAUCUAAACU | 4823 | 57 |
| CAACCCUCAUGAAGUACAA | 1110 | 58 |
| CUUCUAGAGCCUUUGAUCC | 1272 | 59 |
| GGACGAAAGCCAUGGUUGC | 881 | 60 |
| GGGUUGAACUCAAUAAACC | 1229 | 61 |
| GCGAUAAGAUCACCUGGAU | 3914 | 62 |
| UGUGAGGGUUGAACUCAAU | 1224 | 63 |
| UCUAUAUUAGGUACAAUUU | 4814 | 64 |
| UAUGCUACAAGGUACGCAA | 1135 | 65 |
| UCGGUAAAGACGUCUUCUA | 4418 | 66 |
| GUGGAGGUAUACUUCGAAU | 1013 | 67 |
| AGAGCACGAGCUAAAGUAA | 4342 | 68 |
| GAGAGAGCACGAGCUAAAG | 1180 | 69 |
| GAGGGUUGAACUCAAUAAA | 1227 | 70 |
| ACCCAAAUUUGAUAGACUG | 4227 | 71 |
| GUUGCUUGUUAUCCGGGCA | 4054 | 72 |
| AGAUGUGUGACAUGUAUAU | 961 | 73 |
| CACGGCAUCUGUGUGGUGG | 610 | 74 |
| ACGCAAUAACUGUUUGGUA | 4307 | 75 |
| GUGACAUGUAUAUAUUAUC | 4126 | 76 |
| AUAAGUGCCCUGUGUAGAA | 4700 | 77 |
| CGUGCCGUGCAUGAACAAG | 3750 | 78 |
| CUAAAGUAAAAUAUCUAAC | 4352 | 79 |
| AUGAGAGAGCACGAGCUAA | 1178 | 80 |
| AGUGCCCUGUGUAGAAUUU | 4703 | 81 |
| GGCAAUGGAACGGGUUAUG | 910 | 82 |
| AUGUAUAUAUUAUCUUAAU | 972 | 83 |
| AGUACAUCGUGCCGUGCAU | 584 | 84 |
| CAAAAUAACAUCAAUCUAU | 4872 | 85 |
| GCCACUGUAACGGGAAGCU | 3998 | 86 |
| GCACUUUAAUUACAACUGA | 4999 | 87 |
| CGCUGAAGCUGGCGCUCGA | 3725 | 88 |
| AAGGUACGCAAUAACUGUU | 4302 | 89 |
| GGUUGAACUCAAUAAACCU | 1230 | 90 |
| AUCGUGCCGUGCAUGAACA | 3748 | 91 |
| UAGACAACCAGUUCGCAUU | 4527 | 92 |
| GGAGGUAUACUUCGAAUUU | 4174 | 93 |
| GUGCCGUGCAUGAACAAGC | 3751 | 94 |
| CAAGGAGCCCGGCUGCGAA | 780 | 95 |
| GCAAGGAGCCCGGCUGCGA | 779 | 96 |
| CCGGGCAAUGGAACGGGUU | 907 | 97 |
| ACCAGCAUAUGCUACAAGG | 1128 | 98 |
| CCUCUUAAUAAUGAUUGUU | 4933 | 99 |
| GACUUUGUACUGCAUGAUC | 4606 | 100 |
| CAAGGUACGCAAUAACUGU | 4301 | 101 |
| GAGCCCGGCUGCGAAACCA | 3943 | 102 |
| AGGGUUGAACUCAAUAAAC | 1228 | 103 |
| GUACAACCAGCAUAUGCUA | 4282 | 104 |
| CGGACGAAAGCCAUGGUUG | 4039 | 105 |
| GACUCUACUUGUAUUUAAA | 918 | 106 |
| ACGACUUCCUCGGCAAGGA | 629 | 107 |
| GCCAGUGACUGAUGAUUAA | 4952 | 108 |
| GCCAAGGUAAGUGGAGGUA | 4162 | 109 |
| GGUGUGAGGGUUGAACUCA | 4381 | 110 |
| GAGCACGAGCUAAAGUAAA | 1184 | 111 |
| AAUUUGAUAGACUGCUGUU | 4232 | 112 |
| GCCAUGGUUGCUUGUUAUC | 889 | 113 |
| CCGUCGCAACCCUCAUGAA | 4263 | 114 |
| CAGCAUAUGCUACAAGGUA | 4289 | 115 |
| AGGUGUGAGGGUUGAACUC | 4380 | 116 |
| GAGCUAAAGUAAAAUAUCU | 4349 | 117 |
| CGGGAAGCUGGGCAGCUAC | 849 | 118 |
| GGUUGCUUGUUAUCCGGGC | 894 | 119 |
| UACAAUUUAUCUAAACUGA | 4825 | 120 |
| GACUUCCUCGGCAAGGAGA | 631 | 121 |
| CCAUUGGGCUGCUCAUGAG | 800 | 122 |
| GAGCACUUUAAUUACAACU | 4997 | 123 |
| AAGGAGCCCGGCUGCGAAA | 781 | 124 |
| ACAUGUAUAUAUUAUCUUA | 970 | 125 |
| GUAAGUGGAGGUAUACUUC | 4168 | 126 |
| ACGGGAAGCUGGGCAGCUA | 848 | 127 |
| GUGCGCGCCCUGCACGACA | 3832 | 128 |
| CGGCCCAACGGGCAGACGA | 535 | 129 |
| CGUCGCAACCCUCAUGAAG | 1105 | 130 |
| GUCUCUGAGUGUAGUAUGA | 1181 | 131 |
| CAAGGUAAGUGGAGGUAUA | 4164 | 132 |
| UCUUCUAGAGCCUUUGAUC | 1271 | 133 |
| CGCCCUGCACGACACCGGG | 678 | 134 |
| CGUGCAUGAACAAGCACGG | 3755 | 135 |
| CAUCCGCGCAGCACAGAUU | 1838 | 136 |
| GGCUGCUCAUGAGCAGCAU | 806 | 137 |
| CCCUGCACGACACCGGGAA | 680 | 138 |
| GGCAGCUGGUCAGCCAGAA | 710 | 139 |
| GGUUAUGUACGUCAUGUUG | 922 | 140 |
| GGCCCAACGGGCAGACGAA | 536 | 141 |
| GGGAAGCUGGGCAGCUACA | 850 | 142 |
| GGAAGCUGGGCAGCUACAA | 851 | 143 |
| GUAUUAGACUCUACUUGUA | 912 | 144 |
| AAACCAUUGGGCUGCUCAU | 797 | 145 |
| GGGCUGCUCAUGAGCAGCA | 805 | 146 |
| GCGCAAGAGAUUGGAUUAA | 2104 | 147 |
| UUCCGUUAAAGUUUAAAUA | 305 | 148 |
| CAGGGCUUCUUGAAAUAGA | 2158 | 149 |
| UCGUGCCGUGCAUGAACAA | 3749 | 150 |
| AGGUGCGCGCCCUGCACGA | 671 | 151 |
| GAAACCAUUGGGCUGCUCA | 796 | 152 |
| UGCGGCCCAACGGGCAGAC | 3692 | 153 |
| GUGAGGGUUGAACUCAAUA | 4384 | 154 |
| UGCCGUGCAUGAACAAGCA | 3752 | 155 |
| GCAAGAGAUUGGAUUAACA | 2106 | 156 |
| CCCACCUAGUGCUCCUAAU | 79 | 157 |
| CAUCGUGCCGUGCAUGAAC | 3747 | 158 |
| UACAUCGUGCCGUGCAUGA | 3745 | 159 |
| CCGUGCAUGAACAAGCACG | 3754 | 160 |
| CGACAAUGCUACUGGAGUU | 395 | 161 |
| GCGCAGCACAGAUUCUAUU | 1843 | 162 |
| GCAAGCACCACAUGUGUUU | 261 | 163 |
| CGCAGCACAGAUUCUAUUA | 1844 | 164 |
| GCCUGCGGCCCAACGGGCA | 530 | 165 |
| GGACAUUCAUUGCCUCACU | 121 | 166 |
| GUUCGGUUUGAAAUUUGAA | 1363 | 167 |
| ACCGUCGCAACCCUCAUGA | 4262 | 168 |
| CAAUAACUGUUUGGUAUUU | 285 | 169 |
| GGACUUCUCUCAAUUUUCU | 263 | 1049 |
| CUUGUUUGUGGUACUUCAU | 1129 | 1050 |
| GAAAGGUGUUCAAGUACCA | 1486 | 1051 |
| CCUGUAUCUACUACCUGAA | 734 | 1052 |

TABLE 1b
Various PHD siNA sense and antisense sequences corresponding to the
identified target sequences in Table 1a.

| Target Site | SEQ ID | | | SEQ ID |
|---|---|---|---|---|
| (human) | NO: 1 | Sense Sequence | Antisense Sequence | NO: 3 |
| 962 | 1 | GAUGUGUGACAUGUAUAUA | UAUAUACAUGUCACACAUC | 880 |
| 923 | 2 | GUUAUGUACGUCAUGUUGA | UCAACAUGACGUACAUAAC | 881 |
| 932 | 3 | GUCAUGUUGAUAAUCCAAA | UUUGGAUUAUCAACAUGAC | 882 |
| 965 | 4 | GUGUGACAUGUAUAUAUUA | UAAUAUAUACAUGUCACAC | 883 |
| 936 | 5 | UGUUGAUAAUCCAAAUGGA | UCCAUUUGGAUUAUCAACA | 884 |
| 918 | 6 | AACGGGUUAUGUACGUCAU | AUGACGUACAUAACCCGUU | 885 |
| 955 | 7 | GAUGGAAGAUGUGUGACAU | AUGUCACACAUCUUCCAUC | 886 |
| 964 | 8 | UGUGUGACAUGUAUAUAUU | AAUAUAUACAUGUCACACA | 887 |
| 958 | 9 | GGAAGAUGUGUGACAUGUA | UACAUGUCACACAUCUUCC | 888 |
| 971 | 10 | CAUGUAUAUAUUAUCUUAA | UUAAGAUAAUAUAUACAUG | 889 |
| 938 | 11 | UUGAUAAUCCAAAUGGAGA | UCUCCAUUUGGAUUAUCAA | 890 |
| 930 | 12 | ACGUCAUGUUGAUAAUCCA | UGGAUUAUCAACAUGACGU | 891 |
| 957 | 13 | UGGAAGAUGUGUGACAUGU | ACAUGUCACACAUCUUCCA | 892 |
| 887 | 14 | AAGCCAUGGUUGCUUGUUA | UAACAAGCAACCAUGGCUU | 893 |
| 912 | 15 | CAAUGGAACGGGUUAUGUA | UACAUAACCCGUUCCAUUG | 894 |
| 1267 | 16 | GACGUCUUCUAGAGCCUUU | AAAGGCUCUAGAAGACGUC | 895 |
| 969 | 17 | GACAUGUAUAUAUUAUCUU | AAGAUAAUAUAUACAUGUC | 896 |
| 1106 | 18 | GUCGCAACCCUCAUGAAGU | ACUUCAUGAGGGUUGCGAC | 897 |
| 929 | 19 | UACGUCAUGUUGAUAAUCC | GGAUUAUCAACAUGACGUA | 898 |
| 921 | 20 | GGGUUAUGUACGUCAUGUU | AACAUGACGUACAUAACCC | 899 |
| 4390 | 21 | GUUGAACUCAAUAAACCUU | AAGGUUUAUUGAGUUCAAC | 900 |
| 959 | 22 | GAAGAUGUGUGACAUGUAU | AUACAUGUCACACAUCUUC | 901 |
| 4042 | 23 | ACGAAAGCCAUGGUUGCUU | AAGCAACCAUGGCUUUCGU | 902 |
| 973 | 24 | UGUAUAUAUUAUCUUAAUA | UAUUAAGAUAAUAUAUACA | 903 |
| 284 | 25 | GCAAUAACUGUUUGGUAUU | AAUACCAAACAGUUAUUGC | 904 |
| 1056 | 26 | UGCUGACAUUGAACCCAAA | UUUGGGUUCAAUGUCAGCA | 905 |
| 4043 | 27 | CGAAAGCCAUGGUUGCUUG | CAAGCAACCAUGGCUUUCG | 906 |
| 1014 | 28 | UGGAGGUAUACUUCGAAUU | AAUUCGAAGUAUACCUCCA | 907 |
| 908 | 29 | CGGGCAAUGGAACGGGUUA | UAACCCGUUCCAUUGCCCG | 908 |
| 888 | 30 | AGCCAUGGUUGCUUGUUAU | AUAACAAGCAACCAUGGCU | 909 |
| 1107 | 31 | UCGCAACCCUCAUGAAGUA | UACUUCAUGAGGGUUGCGA | 910 |
| 4438 | 32 | AGCCUUUGAUCCAGCAAUA | UAUUGCUGGAUCAAAGGCU | 911 |
| 196 | 33 | CAUUGAACCCAAAUUUGAU | AUCAAAUUUGGGUUCAAUG | 912 |
| 994 | 34 | GACUGGGAUGCCAAGGUAA | UUACCUUGGCAUCCCAGUC | 913 |
| 4323 | 35 | GUAUUUUGAUGCAGAUGAG | CUCAUCUGCAUCAAAAUAC | 914 |
| 1055 | 36 | UUGCUGACAUUGAACCCAA | UUGGGUUCAAUGUCAGCAA | 915 |
| 1223 | 37 | GUGUGAGGGUUGAACUCAA | UUGAGUUCAACCCUCACAC | 916 |
| 920 | 38 | CGGGUUAUGUACGUCAUGU | ACAUGACGUACAUAACCCG | 917 |
| 931 | 39 | CGUCAUGUUGAUAAUCCAA | UUGGAUUAUCAACAUGACG | 918 |
| 4604 | 40 | GUGACUUUGUACUGCAUGA | UCAUGCAGUACAAAGUCAC | 919 |
| 1006 | 41 | AAGGUAAGUGGAGGUAUAC | GUAUACCUCCACUUACCUU | 920 |
| 4297 | 42 | GCUACAAGGUACGCAAUAA | UUAUUGCGUACCUUGUAGC | 921 |
| 4379 | 43 | AAGGUGUGAGGGUUGAACU | AGUUCAACCCUCACACCUU | 922 |
| 4790 | 44 | CAAGUUUGAAUUUGGGAUA | UAUCCCAAAUUCAAACUUG | 923 |
| 4268 | 45 | GCAACCCUCAUGAAGUACA | UGUACUUCAUGAGGGUUGC | 924 |
| 4226 | 46 | AACCCAAAUUUGAUAGACU | AGUCUAUCAAAUUUGGGUU | 925 |
| 4308 | 47 | CGCAAUAACUGUUUGGUAU | AUACCAAACAGUUAUUGCG | 926 |
| 4336 | 48 | GAUGAGAGAGCACGAGCUA | UAGCUCGUGCUCUCUCAUC | 927 |
| 924 | 49 | UUAUGUACGUCAUGUUGAU | AUCAACAUGACGUACAUAA | 928 |
| 4341 | 50 | GAGAGCACGAGCUAAAGUA | UACUUUAGCUCGUGCUCUC | 929 |
| 1115 | 51 | CUCAUGAAGUACAACCAGC | GCUGGUUGUACUUCAUGAG | 930 |
| 4295 | 52 | AUGCUACAAGGUACGCAAU | AUUGCGUACCUUGUAGCAU | 931 |
| 4217 | 53 | CUGACAUUGAACCCAAAUU | AAUUUGGGUUCAAUGUCAG | 932 |
| 4206 | 54 | AGCCCAGUUUGCUGACAUU | AAUGUCAGCAAACUGGGCU | 933 |
| 1048 | 55 | GCCCAGUUUGCUGACAUUG | CAAUGUCAGCAAACUGGGC | 934 |
| 786 | 56 | GCCCGGCUGCGAAACCAUU | AAUGGUUUCGCAGCCGGGC | 935 |
| 4823 | 57 | GGUACAAUUUAUCUAAACU | AGUUUAGAUAAAUUGUACC | 936 |
| 1110 | 58 | CAACCCUCAUGAAGUACAA | UUGUACUUCAUGAGGGUUG | 937 |
| 1272 | 59 | CUUCUAGAGCCUUUGAUCC | GGAUCAAAGGCUCUAGAAG | 938 |
| 881 | 60 | GGACGAAAGCCAUGGUUGC | GCAACCAUGGCUUUCGUCC | 939 |
| 1229 | 61 | GGGUUGAACUCAAUAAACC | GGUUUAUUGAGUUCAACCC | 940 |
| 3914 | 62 | GCGAUAAGAUCACCUGGAU | AUCCAGGUGAUCUUAUCGC | 941 |
| 1224 | 63 | UGUGAGGGUUGAACUCAAU | AUUGAGUUCAACCCUCACA | 942 |
| 4814 | 64 | UCUAUAUUAGGUACAAUUU | AAAUUGUACCUAAUAUAGA | 943 |
| 1135 | 65 | UAUGCUACAAGGUACGCAA | UUGCGUACCUUGUAGCAUA | 944 |
| 4418 | 66 | UCGGUAAAGACGUCUUCUA | UAGAAGACGUCUUUACCGA | 945 |
| 1013 | 67 | GUGGAGGUAUACUUCGAAU | AUUCGAAGUAUACCUCCAC | 946 |
| 4342 | 68 | AGAGCACGAGCUAAAGUAA | UUACUUUAGCUCGUGCUCU | 947 |
| 1180 | 69 | GAGAGAGCACGAGCUAAAG | CUUUAGCUCGUGCUCUCUC | 948 |
| 1227 | 70 | GAGGGUUGAACUCAAUAAA | UUUAUUGAGUUCAACCCUC | 949 |
| 4227 | 71 | ACCCAAAUUUGAUAGACUG | CAGUCUAUCAAAUUUGGGU | 950 |
| 4054 | 72 | GUUGCUUGUUAUCCGGGCA | UGCCCGGAUAACAAGCAAC | 951 |
| 961 | 73 | AGAUGUGUGACAUGUAUAU | AUAUACAUGUCACACAUCU | 952 |
| 610 | 74 | CACGGCAUCUGUGUGGUGG | CCACCACACAGAUGCCGUG | 953 |
| 4307 | 75 | ACGCAAUAACUGUUUGGUA | UACCAAACAGUUAUUGCGU | 954 |
| 4126 | 76 | GUGACAUGUAUAUAUUAUC | GAUAAUAUAUACAUGUCAC | 955 |
| 4700 | 77 | AUAAGUGCCCUGUGUAGAA | UUCUACACAGGGCACUUAU | 956 |
| 3750 | 78 | CGUGCCGUGCAUGAACAAG | CUUGUUCAUGCACGGCACG | 957 |
| 4352 | 79 | CUAAAGUAAAAUAUCUAAC | GUUAGAUAUUUUACUUUAG | 958 |
| 1178 | 80 | AUGAGAGAGCACGAGCUAA | UUAGCUCGUGCUCUCUCAU | 959 |
| 4703 | 81 | AGUGCCCUGUGUAGAAUUU | AAAUUCUACACAGGGCACU | 960 |
| 910 | 82 | GGCAAUGGAACGGGUUAUG | CAUAACCCGUUCCAUUGCC | 961 |
| 972 | 83 | AUGUAUAUAUUAUCUUAAU | AUUAAGAUAAUAUAUACAU | 962 |
| 584 | 84 | AGUACAUCGUGCCGUGCAU | AUGCACGGCACGAUGUACU | 963 |
| 4872 | 85 | CAAAAUAACAUCAAUCUAU | AUAGAUUGAUGUUAUUUUG | 964 |
| 3998 | 86 | GCCACUGUAACGGGAAGCU | AGCUUCCCGUUACAGUGGC | 965 |
| 4999 | 87 | GCACUUUAAUUACAACUGA | UCAGUUGUAAUUAAAGUGC | 966 |
| 3725 | 88 | CGCUGAAGCUGGCGCUCGA | UCGAGCGCCAGCUUCAGCG | 967 |
| 4302 | 89 | AAGGUACGCAAUAACUGUU | AACAGUUAUUGCGUACCUU | 968 |
| 1230 | 90 | GGUUGAACUCAAUAAACCU | AGGUUUAUUGAGUUCAACC | 969 |
| 3748 | 91 | AUCGUGCCGUGCAUGAACA | UGUUCAUGCACGGCACGAU | 970 |
| 4527 | 92 | UAGACAACCAGUUCGCAUU | AAUGCGAACUGGUUGUCUA | 971 |
| 4174 | 93 | GGAGGUAUACUUCGAAUUU | AAAUUCGAAGUAUACCUCC | 972 |
| 3751 | 94 | GUGCCGUGCAUGAACAAGC | GCUUGUUCAUGCACGGCAC | 973 |
| 780 | 95 | CAAGGAGCCCGGCUGCGAA | UUCGCAGCCGGGCUCCUUG | 974 |
| 779 | 96 | GCAAGGAGCCCGGCUGCGA | UCGCAGCCGGGCUCCUUGC | 975 |
| 907 | 97 | CCGGGCAAUGGAACGGGUU | AACCCGUUCCAUUGCCCGG | 976 |
| 1128 | 98 | ACCAGCAUAUGCUACAAGG | CCUUGUAGCAUAUGCUGGU | 977 |
| 4933 | 99 | CCUCUUAAUAAUGAUUGUU | AACAAUCAUUAUUAAGAGG | 978 |
| 4606 | 100 | GACUUUGUACUGCAUGAUC | GAUCAUGCAGUACAAAGUC | 979 |
| 4301 | 101 | CAAGGUACGCAAUAACUGU | ACAGUUAUUGCGUACCUUG | 980 |
| 3943 | 102 | GAGCCCGGCUGCGAAACCA | UGGUUUCGCAGCCGGGCUC | 981 |
| 1228 | 103 | AGGGUUGAACUCAAUAAAC | GUUUAUUGAGUUCAACCCU | 982 |
| 4282 | 104 | GUACAACCAGCAUAUGCUA | UAGCAUAUGCUGGUUGUAC | 983 |
| 4039 | 105 | CGGACGAAAGCCAUGGUUG | CAACCAUGGCUUUCGUCCG | 984 |
| 918 | 106 | GACUCUACUUGUAUUUAAA | UUUAAAUACAAGUAGAGUC | 985 |
| 629 | 107 | ACGACUUCCUCGGCAAGGA | UCCUUGCCGAGGAAGUCGU | 986 |
| 4952 | 108 | GCCAGUGACUGAUGAUUAA | UUAAUCAUCAGUCACUGGC | 987 |
| 4162 | 109 | GCCAAGGUAAGUGGAGGUA | UACCUCCACUUACCUUGGC | 988 |
| 4381 | 110 | GGUGUGAGGGUUGAACUCA | UGAGUUCAACCCUCACACC | 989 |
| 1184 | 111 | GAGCACGAGCUAAAGUAAA | UUUACUUUAGCUCGUGCUC | 990 |
| 4232 | 112 | AAUUUGAUAGACUGCUGUU | AACAGCAGUCUAUCAAAUU | 991 |
| 889 | 113 | GCCAUGGUUGCUUGUUAUC | GAUAACAAGCAACCAUGGC | 992 |
| 4263 | 114 | CCGUCGCAACCCUCAUGAA | UUCAUGAGGGUUGCGACGG | 993 |
| 4289 | 115 | CAGCAUAUGCUACAAGGUA | UACCUUGUAGCAUAUGCUG | 994 |
| 4380 | 116 | AGGUGUGAGGGUUGAACUC | GAGUUCAACCCUCACACCU | 995 |
| 4349 | 117 | GAGCUAAAGUAAAAUAUCU | AGAUAUUUUACUUUAGCUC | 996 |
| 849 | 118 | CGGGAAGCUGGGCAGCUAC | GUAGCUGCCCAGCUUCCCG | 997 |
| 894 | 119 | GGUUGCUUGUUAUCCGGGC | GCCCGGAUAACAAGCAACC | 998 |
| 4825 | 120 | UACAAUUUAUCUAAACUGA | UCAGUUUAGAUAAAUUGUA | 999 |
| 631 | 121 | GACUUCCUCGGCAAGGAGA | UCUCCUUGCCGAGGAAGUC | 1000 |
| 800 | 122 | CCAUUGGGCUGCUCAUGAG | CUCAUGAGCAGCCCAAUGG | 1001 |
| 4997 | 123 | GAGCACUUUAAUUACAACU | AGUUGUAAUUAAAGUGCUC | 1002 |
| 781 | 124 | AAGGAGCCCGGCUGCGAAA | UUUCGCAGCCGGGCUCCUU | 1003 |
| 970 | 125 | ACAUGUAUAUAUUAUCUUA | UAAGAUAAUAUAUACAUGU | 1004 |
| 4168 | 126 | GUAAGUGGAGGUAUACUUC | GAAGUAUACCUCCACUUAC | 1005 |
| 848 | 127 | ACGGGAAGCUGGGCAGCUA | UAGCUGCCCAGCUUCCCGU | 1006 |
| 3832 | 128 | GUGCGCGCCCUGCACGACA | UGUCGUGCAGGGCGCGCAC | 1007 |
| 535 | 129 | CGGCCCAACGGGCAGACGA | UCGUCUGCCCGUUGGGCCG | 1008 |
| 1105 | 130 | CGUCGCAACCCUCAUGAAG | CUUCAUGAGGGUUGCGACG | 1009 |
| 1181 | 131 | GUCUCUGAGUGUAGUAUGA | UCAUACUACACUCAGAGAC | 1010 |
| 4164 | 132 | CAAGGUAAGUGGAGGUAUA | UAUACCUCCACUUACCUUG | 1011 |
| 1271 | 133 | UCUUCUAGAGCCUUUGAUC | GAUCAAAGGCUCUAGAAGA | 1012 |
| 678 | 134 | CGCCCUGCACGACACCGGG | CCCGGUGUCGUGCAGGGCG | 1013 |
| 3755 | 135 | CGUGCAUGAACAAGCACGG | CCGUGCUUGUUCAUGCACG | 1014 |
| 1838 | 136 | CAUCCGCGCAGCACAGAUU | AAUCUGUGCUGCGCGGAUG | 1015 |
| 806 | 137 | GGCUGCUCAUGAGCAGCAU | AUGCUGCUCAUGAGCAGCC | 1016 |
| 680 | 138 | CCCUGCACGACACCGGGAA | UUCCCGGUGUCGUGCAGGG | 1017 |
| 710 | 139 | GGCAGCUGGUCAGCCAGAA | UUCUGGCUGACCAGCUGCC | 1018 |
| 922 | 140 | GGUUAUGUACGUCAUGUUG | CAACAUGACGUACAUAACC | 1019 |
| 536 | 141 | GGCCCAACGGGCAGACGAA | UUCGUCUGCCCGUUGGGCC | 1020 |
| 850 | 142 | GGGAAGCUGGGCAGCUACA | UGUAGCUGCCCAGCUUCCC | 1021 |
| 851 | 143 | GGAAGCUGGGCAGCUACAA | UUGUAGCUGCCCAGCUUCC | 1022 |
| 912 | 144 | GUAUUAGACUCUACUUGUA | UACAAGUAGAGUCUAAUAC | 1023 |
| 797 | 145 | AAACCAUUGGGCUGCUCAU | AUGAGCAGCCCAAUGGUUU | 1024 |
| 805 | 146 | GGGCUGCUCAUGAGCAGCA | UGCUGCUCAUGAGCAGCCC | 1025 |
| 2104 | 147 | GCGCAAGAGAUUGGAUUAA | UUAAUCCAAUCUCUUGCGC | 1026 |
| 305 | 148 | UUCCGUUAAAGUUUAAAUA | UAUUUAAACUUUAACGGAA | 1027 |
| 2158 | 149 | CAGGGCUUCUUGAAAUAGA | UCUAUUUCAAGAAGCCCUG | 1028 |
| 3749 | 150 | UCGUGCCGUGCAUGAACAA | UUGUUCAUGCACGGCACGA | 1029 |
| 671 | 151 | AGGUGCGCGCCCUGCACGA | UCGUGCAGGGCGCGCACCU | 1030 |
| 796 | 152 | GAAACCAUUGGGCUGCUCA | UGAGCAGCCCAAUGGUUUC | 1031 |
| 3692 | 153 | UGCGGCCCAACGGGCAGAC | GUCUGCCCGUUGGGCCGCA | 1032 |
| 4384 | 154 | GUGAGGGUUGAACUCAAUA | UAUUGAGUUCAACCCUCAC | 1033 |
| 3752 | 155 | UGCCGUGCAUGAACAAGCA | UGCUUGUUCAUGCACGGCA | 1034 |
| 2106 | 156 | GCAAGAGAUUGGAUUAACA | UGUUAAUCCAAUCUCUUGC | 1035 |
| 79 | 157 | CCCACCUAGUGCUCCUAAU | AUUAGGAGCACUAGGUGGG | 1036 |
| 3747 | 158 | CAUCGUGCCGUGCAUGAAC | GUUCAUGCACGGCACGAUG | 1037 |
| 3745 | 159 | UACAUCGUGCCGUGCAUGA | UCAUGCACGGCACGAUGUA | 1038 |
| 3754 | 160 | CCGUGCAUGAACAAGCACG | CGUGCUUGUUCAUGCACGG | 1039 |
| 395 | 161 | CGACAAUGCUACUGGAGUU | AACUCCAGUAGCAUUGUCG | 1040 |
| 1843 | 162 | GCGCAGCACAGAUUCUAUU | AAUAGAAUCUGUGCUGCGC | 1041 |
| 261 | 163 | GCAAGCACCACAUGUGUUU | AAACACAUGUGGUGCUUGC | 1042 |
| 1844 | 164 | CGCAGCACAGAUUCUAUUA | UAAUAGAAUCUGUGCUGCG | 1043 |
| 530 | 165 | GCCUGCGGCCCAACGGGCA | UGCCCGUUGGGCCGCAGGC | 1044 |
| 121 | 166 | GGACAUUCAUUGCCUCACU | AGUGAGGCAAUGAAUGUCC | 1045 |
| 1363 | 167 | GUUCGGUUUGAAAUUUGAA | UUCAAAUUUCAAACCGAAC | 1046 |
| 4262 | 168 | ACCGUCGCAACCCUCAUGA | UCAUGAGGGUUGCGACGGU | 1047 |
| 285 | 169 | CAAUAACUGUUUGGUAUUU | AAAUACCAAACAGUUAUUG | 1048 |
| 263 | 1049 | GGACUUCUCUCAAUUUUCU | AGAAAAUUGAGAGAAGUCC | 1061 |
| 1129 | 1050 | CUUGUUUGUGGUACUUCAU | AUGAAGUACCACAAACAAG | 1062 |
| 1486 | 1051 | GAAAGGUGUUCAAGUACCA | UGGUACUUGAACACCUUUC | 1063 |
| 734 | 1052 | CCUGUAUCUACUACCUGAA | UUCAGGUAGUAGAUACAGG | 1064 |

[0379] For each oligonucleotide of a target sequence, the two individual, complementary strands of the siNA were synthesized separately using solid phase synthesis, then purified separately by reversed phase solid phase extraction (SPE). The complementary strands were annealed to form the double strand (duplex) and delivered in the desired concentration and buffer of choice.

[0380] Briefly, the single strand oligonucleotides were synthesized using phosphoramidite chemistry on an automated solid-phase synthesizer, using procedures as are generally known in the art (see for example U.S. application Ser. No. 12/064,014). A synthesis column was packed with solid support derivatized with the first nucleoside residue (natural or chemically modified). Synthesis was initiated by detritylation of the acid labile 5′-O-dimethoxytrityl group to release the 5′-hydroxyl. A suitably protected phosphoramidite and a suitable activator in acetonitrile were delivered simultaneously to the synthesis column resulting in coupling of the amidite to the 5′-hydroxyl. The column was then washed with a solvent, such as acetonitrile. An oxidizing solution, such as an iodine solution was pumped through the column to oxidize the phosphite triester linkage P(III) to its phosphotriester P(V) analog. Unreacted 5′-hydroxyl groups were capped using reagents such as acetic anhydride in the presence of 2,6-lutidine and N-methylimidazole. The elongation cycle was resumed with the detritylation step for the next phosphoramidite incorporation. This process was repeated until the desired sequence was synthesized. The synthesis concluded with the final 5′-terminus protecting group (trityl or 5′-O-dimethoxytrityl).

[0381] Upon completion of the synthesis, the solid-support and associated oligonucleotide were dried under argon pressure or vacuum. Aqueous base was added and the mixture was heated to effect cleavage of the succinyl linkage, removal of the cyanoethyl phosphate protecting group, and deprotection of the exocyclic amine protection.

[0382] The following process was performed on single strands that do not contain ribonucleotides. After treating the solid support with the aqueous base, the mixture was filtered to separate the solid support from the deprotected crude synthesis material. The solid support was then rinsed with water, which is combined with the filtrate. The resultant basic solution allows for retention of the 5′-O-dimethoxytrityl group to remain on the 5′ terminal position (trityl-on).

[0383] For single strands that contain ribonucleotides, the following process was performed. After treating the solid support with the aqueous base, the mixture was filtered to separate the solid support from the deprotected crude synthesis material. The solid support was then rinsed with dimethylsulfoxide (DMSO), which was combined with the filtrate. Fluoride reagent, such as triethylamine trihydrofluoride, was added to the mixture, and the solution was heated. The reaction was quenched with suitable buffer to provide a solution of crude single strand with the 5′-O-dimethoxytrityl group on the final 5′ terminal position.

[0384] The trityl-on solution of each crude single strand was purified using chromatographic purification, such as SPE RPC purification. The hydrophobic nature of the trityl group permits stronger retention of the desired full-length oligo than the non-tritylated truncated failure sequences. The failure sequences were selectively washed from the resin with a suitable solvent, such as low percent acetonitrile. Retained oligonucleotides were then detritylated on-column with trifluoroacetic acid to remove the acid-labile trityl group. Residual acid was washed from the column, a salt exchange was performed, and a final desalting of the material commenced. The full-length oligo was recovered in a purified form with an aqueous-organic solvent. The final product was then analyzed for purity (HPLC), identity (Maldi-TOF MS), and yield (UV A₂₆₀). The oligos were dried via lyophilization or vacuum condensation.

[0385] Annealing: Based on the analysis of the product, the dried oligos were dissolved in appropriate buffers followed by mixing equal molar amounts (calculated using the theoretical extinction coefficient) of the sense and antisense oligonucleotide strands. The solution was then analyzed for purity of duplex by chromatographic methods and desired final concentration. If the analysis indicated an excess of either strand, then the additional non-excess strand was titrated until duplexing was complete. When analysis indicated that the target product purity has been achieved the material was delivered and ready for use.

[0386] Below is a table showing various modified siNAs synthesized using this protocol or that can be synthesized using this protocol or using methods known in the art.

TABLE 1c
PHD siNA Strands Synthesized (Antisense sequences are readily identified as being
complementary to the target sequence shown).

| | Target | | | | |
|---|---|---|---|---|---|
| | Site | SEQ ID | | | SEQ ID |
| siNA duplex ID | (human) | NO: | Target Sequence | Modified Sequence | NO: |
| R-008350764-000X | 962 | 1 | GAUGUGUGACAUGUAUAUA | B GAUGUGUGACAUGUAUAUAUSU B | 170 |
| R-008350764-000X | 962 | 1 | GAUGUGUGACAUGUAUAUA | UAUAuAcAuGucAcAcAucUsU | 171 |
| R-008242746-000B | 923 | 2 | GUUAUGUACGUCAUGUUGA | B GuuAuGuAcGucAuGuuGATT B | 172 |
| R-008242746-000B | 923 | 2 | GUUAUGUACGUCAUGUUGA | UCAAcAuGAcGuAcAuAAcUU | 173 |
| R-008350777-000R | 962 | 1 | GAUGUGUGACAUGUAUAUA | UAUAuAcAuGucAcAcAucUsU | 171 |
| R-008350777-000R | 962 | 1 | GAUGUGUGACAUGUAUAUA | B GAUGUGUGACAUGUAUAUAUSU B | 174 |
| R-008350805-000L | 962 | 1 | GAUGUGUGACAUGUAUAUA | UAUAuAcAuGucAcAcAucUsU | 171 |
| R-008350805-000L | 962 | 1 | GAUGUGUGACAUGUAUAUA | B GAuGuGuGAcAuGuAuAuAUsU B | 175 |
| R-008350656-000M | 962 | 1 | GAUGUGUGACAUGUAUAUA | UAUAuAcAuGucAcAcAucUsU | 171 |
| R-008350656-000M | 962 | 1 | GAUGUGUGACAUGUAUAUA | B GAuGuGuGAcAuGuAuAuATsT B | 176 |
| R-008242866-000W | 932 | 3 | GUCAUGUUGAUAAUCCAAA | B GucAuGuuGAuAAuccAAATT B | 177 |
| R-008242866-000W | 932 | 3 | GUCAUGUUGAUAAUCCAAA | UUUGGAuuAucAAcAuGAcUU | 178 |
| R-008358086-000M | 965 | 4 | GUGUGACAUGUAUAUAUUA | uAAuAuAuAcAuGucAcAcUsU | 179 |
| R-008358086-000M | 965 | 4 | GUGUGACAUGUAUAUAUUA | B GuGuGAcAuGuAuAuAuuAUsU B | 180 |
| R-008242920-000J | 936 | 5 | UGUUGAUAAUCCAAAUGGA | B uGuuGAuAAuccAAAuGGATT B | 181 |
| R-008242920-000J | 936 | 5 | UGUUGAUAAUCCAAAUGGA | UCCAuuuGGAuuAucAAcAUU | 182 |
| R-008242851-000K | 962 | 1 | GAUGUGUGACAUGUAUAUA | B GAuGuGuGAcAuGuAuAuATT B | 183 |
| R-008242851-000K | 962 | 1 | GAUGUGUGACAUGUAUAUA | UAUAuAcAuGucAcAcAucUU | 184 |
| R-008242962-000W | 918 | 6 | AACGGGUUAUGUACGUCAU | B AAcGGGuuAuGuAcGucAuTT B | 185 |
| R-008242962-000W | 918 | 6 | AACGGGUUAUGUACGUCAU | AUGAcGuAcAuAAcccGuuUU | 186 |
| R-008358031-000G | 965 | 4 | GUGUGACAUGUAUAUAUUA | uAAuAuAuAcAuGucAcAcUsU | 179 |
| R-008358031-000G | 965 | 4 | GUGUGACAUGUAUAUAUUA | B GuGuGAcAuGuAuAuAuuAUsU B | 187 |
| R-008350662-000V | 955 | 7 | GAUGGAAGAUGUGUGACAU | B GAUGGAAGAUGUGUGACAUUsU B | 188 |
| R-008350662-000V | 955 | 7 | GAUGGAAGAUGUGUGACAU | AUGUCaCaCaUCUUCCaUCUsU | 189 |
| R-008350773-000F | 964 | 8 | UGUGUGACAUGUAUAUAUU | B uGuGuGAcAuGuAuAuAuuUsU B | 190 |
| R-008350773-000F | 964 | 8 | UGUGUGACAUGUAUAUAUU | AAuAuAuAcAuGucAcAcAUsU | 191 |
| R-008350778-000Z | 955 | 7 | GAUGGAAGAUGUGUGACAU | AUGUCaCaCaUCUUCCaUCUsU | 189 |
| R-008350778-000Z | 955 | 7 | GAUGGAAGAUGUGUGACAU | B GAUGGAAGAUGUGUGACAUUsU B | 192 |
| R-008242878-000F | 958 | 9 | GGAAGAUGUGUGACAUGUA | B GGAAGAuGuGuGAcAuGuATT B | 193 |
| R-008242878-000F | 958 | 9 | GGAAGAUGUGUGACAUGUA | UACAuGucAcAcAucuuccUU | 194 |
| R-008358043-000S | 958 | 9 | GGAAGAUGUGUGACAUGUA | B GGAAGAUGUGUGACAUGUAUsU B | 195 |
| R-008358043-000S | 958 | 9 | GGAAGAUGUGUGACAUGUA | UACaUgUCaCaCaUCUUCCUsU | 196 |
| R-008242980-000N | 971 | 10 | CAUGUAUAUAUUAUCUUAA | B cAuGuAuAuAuuAucuuAATT B | 197 |
| R-008242980-000N | 971 | 10 | CAUGUAUAUAUUAUCUUAA | UUAAGAuAAuAuAuAcAuGUU | 198 |
| R-008350321-000M | 971 | 10 | CAUGUAUAUAUUAUCUUAA | uuAAGAuAAuAuAuAcAuGUsU | 199 |
| R-008350321-000M | 971 | 10 | CAUGUAUAUAUUAUCUUAA | B CAUGUAUAUAUUAUCUUAAUsU B | 200 |
| R-008242923-000K | 938 | 11 | UUGAUAAUCCAAAUGGAGA | B uuGAuAAuccAAAuGGAGATT B | 201 |
| R-008242923-000K | 938 | 11 | UUGAUAAUCCAAAUGGAGA | UCUccAuuuGGAuuAucAAUU | 202 |
| R-008242914-000B | 930 | 12 | ACGUCAUGUUGAUAAUCCA | B AcGucAuGuuGAuAAuccATT B | 203 |
| R-008242914-000B | 930 | 12 | ACGUCAUGUUGAUAAUCCA | UGGAuuAucAAcAuGAcGuUU | 204 |
| R-008350707-000U | 962 | 1 | GAUGUGUGACAUGUAUAUA | B GAUGUGUGACAUGUAUAUAUsU B | 170 |
| R-008350707-000U | 962 | 1 | GAUGUGUGACAUGUAUAUA | uAuAuAcAuGucAcAcAucUsU | 205 |
| R-008350784-000G | 964 | 8 | UGUGUGACAUGUAUAUAUU | B UGUGUGACAUGUAUAUAUUUsU B | 206 |
| R-008350784-000G | 964 | 8 | UGUGUGACAUGUAUAUAUU | AAUaUaUaCaUgUCaCaCaUsU | 207 |
| R-008350681-000W | 964 | 8 | UGUGUGACAUGUAUAUAUU | AAUaUaUaCaUgUCaCaCaUsU | 207 |
| R-008350681-000W | 964 | 8 | UGUGUGACAUGUAUAUAUU | B UGUGUGACAUGUAUAUAUUUsU B | 208 |
| R-008358084-000V | 938 | 11 | UUGAUAAUCCAAAUGGAGA | B UUGAUAAUCCAAAUGGAGAUsU B | 209 |
| R-008358084-000V | 938 | 11 | UUGAUAAUCCAAAUGGAGA | UCUccAuuuGGAuuAucAAUsU | 210 |
| R-008350667-000N | 955 | 7 | GAUGGAAGAUGUGUGACAU | B GAUGGAAGAUGUGUGACAUUsU B | 188 |
| R-008350667-000N | 955 | 7 | GAUGGAAGAUGUGUGACAU | AUGUCACACAUCUUCCAUCUsU | 211 |
| R-008242938-000W | 957 | 13 | UGGAAGAUGUGUGACAUGU | B uGGAAGAuGuGuGAcAuGuTT B | 212 |
| R-008242938-000W | 957 | 13 | UGGAAGAUGUGUGACAUGU | ACAuGucAcAcAucuuccAUU | 213 |
| R-008358079-000W | 958 | 9 | GGAAGAUGUGUGACAUGUA | B GGAAGAUGUGUGACAUGUAUsU B | 214 |
| R-008358079-000W | 958 | 9 | GGAAGAUGUGUGACAUGUA | UACAuGucAcAcAucuuccUsU | 215 |
| R-008350807-000D | 955 | 7 | GAUGGAAGAUGUGUGACAU | B GAUGGAAGAUGUGUGACAUUsU B | 192 |
| R-008350807-000D | 955 | 7 | GAUGGAAGAUGUGUGACAU | AUGUCACACAUCUUCCAUCUsU | 211 |
| R-008350323-000E | 971 | 10 | CAUGUAUAUAUUAUCUUAA | uuAAGAuAAuAuAuAcAuGUsU | 199 |
| R-008350323-000E | 971 | 10 | CAUGUAUAUAUUAUCUUAA | B cAuGuAuAuAuuAucuuAAUsU B | 216 |
| R-008242956-000N | 955 | 7 | GAUGGAAGAUGUGUGACAU | B GAuGGAAGAuGuGuGAcAuTT B | 217 |
| R-008242956-000N | 955 | 7 | GAUGGAAGAUGUGUGACAU | AUGucAcAcAucuuccAucUU | 218 |
| R-008350766-000P | 955 | 7 | GAUGGAAGAUGUGUGACAU | B GAUGGAAGAUGUGUGACAUUsU B | 188 |
| R-008350766-000P | 955 | 7 | GAUGGAAGAUGUGUGACAU | AUGucAcAcAucuuccAucUsU | 219 |
| R-008242953-000M | 965 | 4 | GUGUGACAUGUAUAUAUUA | B GuGuGAcAuGuAuAuAuuATT B | 220 |
| R-008242953-000M | 965 | 4 | GUGUGACAUGUAUAUAUUA | U AAuAuAuAcAuGucAcAcUU | 221 |
| R-008242797-000X | 964 | 8 | UGUGUGACAUGUAUAUAUU | B uGuGuGAcAuGuAuAuAuuTT B | 222 |
| R-008242797-000X | 964 | 8 | UGUGUGACAUGUAUAUAUU | AAUAuAuAcAuGucAcAcAUU | 223 |
| R-008350328-000Y | 964 | 8 | UGUGUGACAUGUAUAUAUU | AAuAuAuAcAuGucAcAcAUsU | 191 |
| R-008350328-000Y | 964 | 8 | UGUGUGACAUGUAUAUAUU | B UGUGUGACAUGUAUAUAUUUsU B | 208 |
| R-008350806-000V | 955 | 7 | GAUGGAAGAUGUGUGACAU | B GAUGGAAGAUGUGUGACAUUsU B | 188 |
| R-008350806-000V | 955 | 7 | GAUGGAAGAUGUGUGACAU | AUGUCACACAUCUUCCAUCUsU | 224 |
| R-008358087-000W | 965 | 4 | GUGUGACAUGUAUAUAUUA | uAAuAuAuAcAuGucAcAcUsU | 179 |
| R-008358087-000W | 965 | 4 | GUGUGACAUGUAUAUAUUA | B GUGUGACAUGUAUAUAUUAUsU B | 225 |
| R-008350751-000D | 964 | 8 | UGUGUGACAUGUAUAUAUU | B UGUGUGACAUGUAUAUAUUUsU B | 208 |
| R-008350751-000D | 964 | 8 | UGUGUGACAUGUAUAUAUU | AAUAUAUACAUGUCACACAUsU | 226 |
| R-008350768-000G | 971 | 10 | CAUGUAUAUAUUAUCUUAA | uuAAGAuAAuAuAuAcAuGUsU | 199 |
| R-008350768-000G | 971 | 10 | CAUGUAUAUAUUAUCUUAA | B CAUGUAUAUAUUAUCUUAAUsU B | 227 |
| R-008358085-000D | 938 | 11 | UUGAUAAUCCAAAUGGAGA | ucuccAuuuGGAuuAucAAUsU | 228 |
| R-008358085-000D | 938 | 11 | UUGAUAAUCCAAAUGGAGA | B UUGAUAAUCCAAAUGGAGAUsU B | 229 |
| R-008350771-000N | 964 | 8 | UGUGUGACAUGUAUAUAUU | AAuAuAuAcAuGucAcAcAUsU | 191 |
| R-008350771-000N | 964 | 8 | UGUGUGACAUGUAUAUAUU | B UGUGUGACAUGUAUAUAUUUsU B | 206 |
| R-008350797-000A | 971 | 10 | CAUGUAUAUAUUAUCUUAA | B cAuGuAuAuAuuAucuuAATsT B | 230 |
| R-008350797-000A | 971 | 10 | CAUGUAUAUAUUAUCUUAA | UUAAGAuAAuAuAuAcAuGUsU | 231 |
| R-008350657-000W | 936 | 5 | UGUUGAUAAUCCAAAUGGA | uccAuuuGGAuuAucAAcAUsU | 232 |
| R-008350657-000W | 936 | 5 | UGUUGAUAAUCCAAAUGGA | B UGUUGAUAAUCCAAAUGGAUsU B | 233 |
| R-008350608-000T | 936 | 5 | UGUUGAUAAUCCAAAUGGA | B UGUUGAUAAUCCAAAUGGAUsU B | 233 |
| R-008350608-000T | 936 | 5 | UGUUGAUAAUCCAAAUGGA | UCCaUUUggaUUaUCaaCaUsU | 234 |
| R-008350748-000X | 971 | 10 | CAUGUAUAUAUUAUCUUAA | UUAAGAuAAuAuAuAcAuGUsU | 231 |
| R-008350748-000X | 971 | 10 | CAUGUAUAUAUUAUCUUAA | B cAuGuAuAuAuuAucuuAAUsU B | 235 |
| R-008242815-000A | 887 | 14 | AAGCCAUGGUUGCUUGUUA | B AAGccAuGGuuGcuuGuuATT B | 236 |
| R-008242815-000A | 887 | 14 | AAGCCAUGGUUGCUUGUUA | UAAcAAGcAAccAuGGcuuUU | 237 |
| R-008350779-000H | 955 | 7 | GAUGGAAGAUGUGUGACAU | B GAUGGAAGAUGUGUGACAUUsU B | 192 |
| R-008350779-000H | 955 | 7 | GAUGGAAGAUGUGUGACAU | AUGucAcAcAucuuccAucUsU | 219 |
| R-008350691-000N | 936 | 5 | UGUUGAUAAUCCAAAUGGA | B UGUUGAUAAUCCAAAUGGAUsU B | 238 |
| R-008350691-000N | 936 | 5 | UGUUGAUAAUCCAAAUGGA | UCCAuuuGGAuuAucAAcAUsU | 239 |
| R-008350331-000E | 964 | 8 | UGUGUGACAUGUAUAUAUU | B uGuGuGAcAuGuAuAuAuuUsU B | 240 |
| R-008350331-000E | 964 | 8 | UGUGUGACAUGUAUAUAUU | AAUAuAuAcAuGucAcAcAUsU | 241 |
| R-008350762-000E | 971 | 10 | CAUGUAUAUAUUAUCUUAA | UUAAGAuAAuAuAuAcAuGUsU | 231 |
| R-008350762-000E | 971 | 10 | CAUGUAUAUAUUAUCUUAA | B cAuGuAuAuAuuAucuuAAUsU B | 242 |
| R-008350737-000W | 964 | 8 | UGUGUGACAUGUAUAUAUU | B UGUGUGACAUGUAUAUAUUUsU B | 206 |
| R-008350737-000W | 964 | 8 | UGUGUGACAUGUAUAUAUU | AAUAUAUACAUGUCACACAUsU | 226 |
| R-008358071-000B | 938 | 11 | UUGAUAAUCCAAAUGGAGA | UCUccAuuuGGAuuAucAAUsU | 210 |
| R-008358071-000B | 938 | 11 | UUGAUAAUCCAAAUGGAGA | B UUGAUAAUCCAAAUGGAGAUsU B | 229 |
| R-008350794-000Z | 955 | 7 | GAUGGAAGAUGUGUGACAU | B GAUGGAAGAUGUGUGACAUUsU B | 243 |
| R-008350794-000Z | 955 | 7 | GAUGGAAGAUGUGUGACAU | AUGUCACACAUCUUCCAUCUsU | 244 |
| R-008350789-000A | 962 | 1 | GAUGUGUGACAUGUAUAUA | uAuAuAcAuGucAcAcAucUsU | 205 |
| R-008350789-000A | 962 | 1 | GAUGUGUGACAUGUAUAUA | B GAuGuGuGAcAuGuAuAuAUsU B | 245 |
| R-008242965-000X | 912 | 15 | CAAUGGAACGGGUUAUGUA | B cAAuGGAAcGGGuuAuGuATT B | 246 |
| R-008242965-000X | 912 | 15 | CAAUGGAACGGGUUAUGUA | UACAuAAcccGuuccAuuGUU | 247 |
| R-008358036-000A | 958 | 9 | GGAAGAUGUGUGACAUGUA | B GGAAGAUGUGUGACAUGUAUsU B | 214 |
| R-008358036-000A | 958 | 9 | GGAAGAUGUGUGACAUGUA | uAcAuGucAcAcAucuuccUsU | 248 |
| R-008350586-000E | 936 | 5 | UGUUGAUAAUCCAAAUGGA | uccAuuuGGAuuAucAAcAUsU | 232 |
| R-008350586-000E | 936 | 5 | UGUUGAUAAUCCAAAUGGA | B uGuuGAuAAuccAAAuGGAUsU B | 249 |
| R-008358075-000L | 938 | 11 | UUGAUAAUCCAAAUGGAGA | UCUccAuuuGGAuuAucAAUsU | 210 |
| R-008358075-000L | 938 | 11 | UUGAUAAUCCAAAUGGAGA | B uuGAuAAuccAAAuGGAGATsT B | 250 |
| R-008350750-000V | 964 | 8 | UGUGUGACAUGUAUAUAUU | B UGUGUGACAUGUAUAUAUUUsU B | 208 |
| R-008350750-000V | 964 | 8 | UGUGUGACAUGUAUAUAUU | AAUAUAUACAUGUCACACAUsU | 251 |
| R-008350740-000C | 962 | 1 | GAUGUGUGACAUGUAUAUA | B GAUGUGUGACAUGUAUAUAUSU B | 174 |
| R-008350740-000C | 962 | 1 | GAUGUGUGACAUGUAUAUA | UAuAuAcAuGucAcAcAucUsU | 205 |
| R-008350694-000P | 936 | 5 | UGUUGAUAAUCCAAAUGGA | uccAuuuGGAuuAucAAcAUsU | 232 |
| R-008350694-000P | 936 | 5 | UGUUGAUAAUCCAAAUGGA | B UGUUGAUAAUCCAAAUGGAUsU B | 238 |
| R-008358046-000T | 958 | 9 | GGAAGAUGUGUGACAUGUA | UACAuGucAcAcAucuuccUsU | 215 |
| R-008358046-000T | 958 | 9 | GGAAGAUGUGUGACAUGUA | B GGAAGAuGuGuGAcAuGuAUsU B | 252 |
| R-008358094-000M | 938 | 11 | UUGAUAAUCCAAAUGGAGA | B UUGAUAAUCCAAAUGGAGAUsU B | 209 |
| R-008358094-000M | 938 | 11 | UUGAUAAUCCAAAUGGAGA | ucuccAuuuGGAuuAucAAUsU | 228 |
| R-008350759-000Y | 955 | 7 | GAUGGAAGAUGUGUGACAU | AUGucAcAcAucuuccAucUsU | 219 |
| R-008350759-000Y | 955 | 7 | GAUGGAAGAUGUGUGACAU | B GAuGGAAGAuGuGuGAcAuTsT B | 253 |
| R-008358007-000G | 958 | 9 | GGAAGAUGUGUGACAUGUA | UACaUgUCaCaCaUCUUCCUsU | 196 |
| R-008358007-000G | 958 | 9 | GGAAGAUGUGUGACAUGUA | B GGAAGAUGUGUGACAUGUAUsU B | 214 |
| R-008358078-000M | 965 | 4 | GUGUGACAUGUAUAUAUUA | B GUGUGACAUGUAUAUAUUAUsU B | 254 |
| R-008358078-000M | 965 | 4 | GUGUGACAUGUAUAUAUUA | UAAUAUAUACAUGUCACACUsU | 255 |
| R-008350624-000T | 936 | 5 | UGUUGAUAAUCCAAAUGGA | UCCAuuuGGAuuAucAAcAUsU | 239 |
| R-008350624-000T | 936 | 5 | UGUUGAUAAUCCAAAUGGA | B uGuuGAuAAuccAAAuGGATsT B | 256 |
| R-008358048-000K | 958 | 9 | GGAAGAUGUGUGACAUGUA | UACAuGucAcAcAucuuccUsU | 215 |
| R-008358048-000K | 958 | 9 | GGAAGAUGUGUGACAUGUA | B GGAAGAuGuGuGAcAuGuATsT B | 257 |
| R-008350729-000W | 955 | 7 | GAUGGAAGAUGUGUGACAU | AUGucAcAcAucuuccAucUsU | 219 |
| R-008350729-000W | 955 | 7 | GAUGGAAGAUGUGUGACAU | B GAuGGAAGAuGuGuGAcAuUsU B | 258 |
| R-008350693-000F | 964 | 8 | UGUGUGACAUGUAUAUAUU | AAUAuAuAcAuGucAcAcAUsU | 241 |
| R-008350693-000F | 964 | 8 | UGUGUGACAUGUAUAUAUU | B uGuGuGAcAuGuAuAuAuuTsT B | 259 |
| R-008358068-000V | 958 | 9 | GGAAGAUGUGUGACAUGUA | UACAuGucAcAcAucuuccUsU | 215 |
| R-008358068-000V | 958 | 9 | GGAAGAUGUGUGACAUGUA | B GGAAGAuGuGuGAcAuGuAUsU B | 260 |
| R-008350699-000H | 964 | 8 | UGUGUGACAUGUAUAUAUU | B UGUGUGACAUGUAUAUAUUUsU B | 261 |
| R-008350699-000H | 964 | 8 | UGUGUGACAUGUAUAUAUU | AAUAUAUACAUGUCACACAUsU | 262 |
| R-008350732-000C | 971 | 10 | CAUGUAUAUAUUAUCUUAA | B CAUGUAUAUAUUAUCUUAAUsU B | 200 |
| R-008350732-000C | 971 | 10 | CAUGUAUAUAUUAUCUUAA | UUAAGAuAAuAuAuAcAuGUsU | 231 |
| R-008358089-000N | 958 | 9 | GGAAGAUGUGUGACAUGUA | B GGAAGAUGUGUGACAUGUAUsU B | 195 |
| R-008358089-000N | 958 | 9 | GGAAGAUGUGUGACAUGUA | UACAUGUCACACAUCUUCCUsU | 263 |
| R-008350770-000E | 964 | 8 | UGUGUGACAUGUAUAUAUU | B UGUGUGACAUGUAUAUAUUUsU B | 206 |
| R-008350770-000E | 964 | 8 | UGUGUGACAUGUAUAUAUU | AAUAuAuAcAuGucAcAcAUsU | 241 |
| R-008358064-000K | 958 | 9 | GGAAGAUGUGUGACAUGUA | UACaUgUCaCaCaUCUUCCUsU | 196 |
| R-008358064-000K | 958 | 9 | GGAAGAUGUGUGACAUGUA | B GGAAGAuGuGuGAcAuGuAUsU B | 260 |
| R-008350725-000L | 955 | 7 | GAUGGAAGAUGUGUGACAU | B GAUGGAAGAUGUGUGACAUUsU B | 188 |
| R-008350725-000L | 955 | 7 | GAUGGAAGAUGUGUGACAU | AuGucAcAcAucuuccAucUsU | 264 |
| R-008357995-000P | 965 | 4 | GUGUGACAUGUAUAUAUUA | B GUGUGACAUGUAUAUAUUAUsU B | 265 |
| R-008357995-000P | 965 | 4 | GUGUGACAUGUAUAUAUUA | UAAUAUAUACAUGUCACACUsU | 266 |
| R-008350654-000V | 936 | 5 | UGUUGAUAAUCCAAAUGGA | B UGUUGAUAAUCCAAAUGGAUsU B | 233 |
| R-008350654-000V | 936 | 5 | UGUUGAUAAUCCAAAUGGA | UCCAuuuGGAuuAucAAcAUsU | 239 |
| R-008350718-000V | 955 | 7 | GAUGGAAGAUGUGUGACAU | AUGUCaCaCaUCUUCCaUCUsU | 189 |
| R-008350718-000V | 955 | 7 | GAUGGAAGAUGUGUGACAU | B GAuGGAAGAuGuGuGAcAuUsU B | 267 |
| R-008242809-000T | 1267 | 16 | GACGUCUUCUAGAGCCUUU | B GAcGucuucuAGAGccuuuTT B | 268 |
| R-008242809-000T | 1267 | 16 | GACGUCUUCUAGAGCCUUU | AAAGGcucuAGAAGAcGucUU | 269 |
| R-008358067-000L | 958 | 9 | GGAAGAUGUGUGACAUGUA | B GGAAGAuGuGuGAcAuGuAUsU B | 260 |
| R-008358067-000L | 958 | 9 | GGAAGAUGUGUGACAUGUA | UACAUGUCACACAUCUUCCUsU | 263 |
| R-008350334-000F | 962 | 1 | GAUGUGUGACAUGUAUAUA | B GAUGUGUGACAUGUAUAUAUsU B | 174 |
| R-008350334-000F | 962 | 1 | GAUGUGUGACAUGUAUAUA | UAUaUaCaUgUCaCaCaUCUsU | 270 |
| R-008357994-000F | 965 | 4 | GUGUGACAUGUAUAUAUUA | B GUGUGACAUGUAUAUAUUAUsU B | 225 |
| R-008357994-000F | 965 | 4 | GUGUGACAUGUAUAUAUUA | UAAUAUAUACAUGUCACACUsU | 266 |
| R-008350743-000D | 955 | 7 | GAUGGAAGAUGUGUGACAU | AuGucAcAcAucuuccAucUsU | 264 |
| R-008350743-000D | 955 | 7 | GAUGGAAGAUGUGUGACAU | B GAuGGAAGAuGuGuGAcAuUsU B | 271 |
| R-008242983-000P | 969 | 17 | GACAUGUAUAUAUUAUCUU | B GAcAuGuAuAuAuuAucuuTT B | 272 |
| R-008242983-000P | 969 | 17 | GACAUGUAUAUAUUAUCUU | AAGAuAAuAuAuAcAuGucUU | 273 |
| R-008293560-000E | 1106 | 18 | GUCGCAACCCUCAUGAAGU | B GUCGCAACCCUCAUGAAGUUsU B | 274 |
| R-008293560-000E | 1106 | 18 | GUCGCAACCCUCAUGAAGU | ACUUcAuGAGGGuuGcGAcUU | 275 |
| R-008242785-000M | 929 | 19 | UACGUCAUGUUGAUAAUCC | B uAcGucAuGuuGAUuAAuccTT B | 276 |
| R-008242785-000M | 929 | 19 | UACGUCAUGUUGAUAAUCC | GGAuuAucAAcAuGAcGuAUU | 277 |
| R-008350799-000T | 964 | 8 | UGUGUGACAUGUAUAUAUU | B UGUGUGACAUGUAUAUAUUUsU B | 208 |
| R-008350799-000T | 964 | 8 | UGUGUGACAUGUAUAUAUU | AAUAuAuAcAuGucAcAcAUsU | 241 |
| R-008350721-000B | 955 | 7 | GAUGGAAGAUGUGUGACAU | B GAUGGAAGAUGUGUGACAUUsU B | 192 |
| R-008350721-000B | 955 | 7 | GAUGGAAGAUGUGUGACAU | AUGUCACACAUCUUCCAUCUsU | 224 |
| R-008350733-000L | 971 | 10 | CAUGUAUAUAUUAUCUUAA | uuAAGAuAAuAuAuAcAuGUsU | 199 |
| R-008350733-000L | 971 | 10 | CAUGUAUAUAUUAUCUUAA | B cAuGuAuAuAuuAucuuAAUsU B | 235 |
| R-008242740-000Z | 921 | 20 | GGGUUAUGUACGUCAUGUU | B GGGuuAuGuAcGucAuGuuTT B | 278 |
| R-008242740-000Z | 921 | 20 | GGGUUAUGUACGUCAUGUU | AACAuGAcGuAcAuAAcccUU | 279 |
| R-008358088-000E | 958 | 9 | GGAAGAUGUGUGACAUGUA | B GGAAGAUGUGUGACAUGUAUsU B | 214 |
| R-008358088-000E | 958 | 9 | GGAAGAUGUGUGACAUGUA | UACAUGUCACACAUCUUCCUsU | 263 |
| R-008358004-000F | 938 | 11 | UUGAUAAUCCAAAUGGAGA | ucuccAuuuGGAuuAucAAUsU | 228 |
| R-008358004-000F | 938 | 11 | UUGAUAAUCCAAAUGGAGA | B uuGAuAAuccAAAuGGAGAUsU B | 280 |
| R-008358050-000H | 965 | 4 | GUGUGACAUGUAUAUAUUA | B GUGUGACAUGUAUAUAUUAUsU B | 225 |
| R-008358050-000H | 965 | 4 | GUGUGACAUGUAUAUAUUA | U AAuAuAuAcAuGucAcAcUsU | 281 |
| R-008291303-000T | 1267 | 16 | GACGUCUUCUAGAGCCUUU | B GACGUCUUCUAGAGCCUUUUsU B | 282 |
| R-008291303-000T | 1267 | 16 | GACGUCUUCUAGAGCCUUU | AAAGGCUCUAGAAGACGUCUU | 283 |
| R-008293562-000X | 1106 | 18 | GUCGCAACCCUCAUGAAGU | B GucGcAAcccucAuGAAGUUsU B | 284 |
| R-008293562-000X | 1106 | 18 | GUCGCAACCCUCAUGAAGU | AsCUUCAUGAGGGUUGCGACUsU | 285 |
| R-008350760-000M | 971 | 10 | CAUGUAUAUAUUAUCUUAA | B CAUGUAUAUAUUAUCUUAAUsU B | 227 |
| R-008350760-000M | 971 | 10 | CAUGUAUAUAUUAUCUUAA | UUAAGAuAAuAuAuAcAuGUsU | 231 |
| R-008358061-000J | 965 | 4 | GUGUGACAUGUAUAUAUUA | B GuGuGAcAuGuAuAuAuuAUsU B | 180 |
| R-008358061-000J | 965 | 4 | GUGUGACAUGUAUAUAUUA | UAAUAUAUACAUGUCACACUsU | 266 |
| R-008358015-000G | 958 | 9 | GGAAGAUGUGUGACAUGUA | B GGAAGAUGUGUGACAUGUAUsU B | 286 |
| R-008358015-000G | 958 | 9 | GGAAGAUGUGUGACAUGUA | UACAUGUCACACAUCUUCCUsU | 287 |
| R-008291307-000C | 1267 | 16 | GACGUCUUCUAGAGCCUUU | B GACGUCUUCUAGAGCCUUUUsU B | 282 |
| R-008291307-000C | 1267 | 16 | GACGUCUUCUAGAGCCUUU | AsAsAsGGCUCUAGAAGACGUCUU | 288 |
| R-008350765-000F | 955 | 7 | GAUGGAAGAUGUGUGACAU | AUGUCACACAUCUUCCAUCUsU | 211 |
| R-008350765-000F | 955 | 7 | GAUGGAAGAUGUGUGACAU | B GAuGGAAGAuGuGuGAcAuUsU B | 267 |
| R-008350774-000P | 962 | 1 | GAUGUGUGACAUGUAUAUA | B GAUGUGUGACAUGUAUAUAUsU B | 170 |
| R-008350774-000P | 962 | 1 | GAUGUGUGACAUGUAUAUA | UAUaUaCaUgUCaCaCaUCUsU | 270 |
| R-008350648-000M | 936 | 5 | UGUUGAUAAUCCAAAUGGA | UCCaUUUggaUUaUCaaCaUsU | 234 |
| R-008350648-000M | 936 | 5 | UGUUGAUAAUCCAAAUGGA | B uGuuGAuAAuccAAAuGGAUsU B | 289 |
| R-008293573-000Y | 1267 | 16 | GACGUCUUCUAGAGCCUUU | aaaGGCUCUAGAAGACGUCUsU | 290 |
| R-008293573-000Y | 1267 | 16 | GACGUCUUCUAGAGCCUUU | B GAcGucuucuAGAGccUUUUsU B | 291 |
| R-008293571-000F | 4390 | 21 | GUUGAACUCAAUAAACCUU | B GuuGAAcucAAuAAAcCUUUsU B | 292 |
| R-008293571-000F | 4390 | 21 | GUUGAACUCAAUAAACCUU | AsAsGGUUUAUUGAGUUCAACUsU | 293 |
| R-008357991-000E | 965 | 4 | GUGUGACAUGUAUAUAUUA | UAAuAuAuAcAuGucAcAcUsU | 179 |
| R-008357991-000E | 965 | 4 | GUGUGACAUGUAUAUAUUA | B GUGUGACAUGUAUAUAUUAUsU B | 265 |
| R-008350634-000K | 936 | 5 | UGUUGAUAAUCCAAAUGGA | B uGuuGAuAAuccAAAuGGAUsU B | 289 |
| R-008350634-000K | 936 | 5 | UGUUGAUAAUCCAAAUGGA | UCCAUUUGGAUUAUCAACAUsU | 294 |
| R-008293542-000M | 4390 | 21 | GUUGAACUCAAUAAACCUU | aagGUUUAUUGAGUUCAACUsU | 295 |
| R-008293542-000M | 4390 | 21 | GUUGAACUCAAUAAACCUU | B GUUGAACUCAAUAAACCUUUsU B | 296 |
| R-008358038-000T | 958 | 9 | GGAAGAUGUGUGACAUGUA | uAcAuGucAcAcAucuuccUsU | 248 |
| R-008358038-000T | 958 | 9 | GGAAGAUGUGUGACAUGUA | B GGAAGAuGuGuGAcAuGuAUsU B | 297 |
| R-008053255-001R | 4390 | 21 | GUUGAACUCAAUAAACCUU | B GuuGAAcucAAuAAAccuuTT B | 298 |
| R-008053255-001R | 4390 | 21 | GUUGAACUCAAUAAACCUU | AAGGuuuAuuGAGuucAAcUU | 299 |
| R-008242752-000J | 959 | 22 | GAAGAUGUGUGACAUGUAU | B GAAGAuGuGuGAcAuGuAuTT B | 300 |
| R-008242752-000J | 959 | 22 | GAAGAUGUGUGACAUGUAU | AUAcAuGucAcAcAucuucUU | 301 |
| R-008293548-000P | 1267 | 16 | GACGUCUUCUAGAGCCUUU | B GAcGucuucuAGAGccUUUUsU B | 291 |
| R-008293548-000P | 1267 | 16 | GACGUCUUCUAGAGCCUUU | AsAsAGGCUCUAGAAGACGUCUsU | 302 |
| R-008350769-000R | 964 | 8 | UGUGUGACAUGUAUAUAUU | AAUAuAuAcAuGucAcAcAUsU | 241 |
| R-008350769-000R | 964 | 8 | UGUGUGACAUGUAUAUAUU | B uGuGuGAcAuGuAuAuAuuUsU B | 303 |
| R-008053262-001G | 4042 | 23 | ACGAAAGCCAUGGUUGCUU | B AcGAAAGccAuGGuuGcuuTT B | 304 |
| R-008053262-001G | 4042 | 23 | ACGAAAGCCAUGGUUGCUU | AAGcAAccAuGGcuuucGuUU | 305 |
| R-008242974-000F | 973 | 24 | UGUAUAUAUUAUCUUAAUA | B uGuAuAuAuuAucuuAAuATT B | 306 |
| R-008242974-000F | 973 | 24 | UGUAUAUAUUAUCUUAAUA | UAUuAAGAuAAuAuAuAcAUU | 307 |
| R-008358080-000K | 958 | 9 | GGAAGAUGUGUGACAUGUA | B GGAAGAUGUGUGACAUGUAUsU B | 195 |
| R-008358080-000K | 958 | 9 | GGAAGAUGUGUGACAUGUA | UACAuGucAcAcAucuuccUsU | 215 |
| R-008350620-000H | 936 | 5 | UGUUGAUAAUCCAAAUGGA | B UGUUGAUAAUCCAAAUGGAUsU B | 233 |
| R-008350620-000H | 936 | 5 | UGUUGAUAAUCCAAAUGGA | UCCAUUUGGAUUAUCAACAUsU | 294 |
| R-008358002-000N | 938 | 11 | UUGAUAAUCCAAAUGGAGA | ucuccAuuuGGAuuAucAAUsU | 228 |
| R-008358002-000N | 938 | 11 | UUGAUAAUCCAAAUGGAGA | B uuGAuAAuccAAAuGGAGAUsU B | 308 |
| R-008358093-000D | 938 | 11 | UUGAUAAUCCAAAUGGAGA | B UUGAUAAUCCAAAUGGAGAUsU B | 229 |
| R-008358093-000D | 938 | 11 | UUGAUAAUCCAAAUGGAGA | UCUCCAUUUGGAUUAUCAAUsU | 309 |
| R-008293570-000X | 1106 | 18 | GUCGCAACCCUCAUGAAGU | B GucGcAAcccucAuGAAGUUsU B | 284 |
| R-008293570-000X | 1106 | 18 | GUCGCAACCCUCAUGAAGU | AsCsUUCAUGAGGGUUGCGACUsU | 310 |
| R-008293546-000X | 4390 | 21 | GUUGAACUCAAUAAACCUU | B GUUGAACUCAAUAAACCUUUsU B | 296 |
| R-008293546-000X | 4390 | 21 | GUUGAACUCAAUAAACCUU | AAGGuuuAuuGAGuucAAcUU | 299 |
| R-008293568-000Z | 1106 | 18 | GUCGCAACCCUCAUGAAGU | B GUCGCAACCCUCAUGAAGUUsU B | 274 |
| R-008293568-000Z | 1106 | 18 | GUCGCAACCCUCAUGAAGU | AcuUCAUGAGGGUUGCGACUsU | 311 |
| R-008350583-000D | 936 | 5 | UGUUGAUAAUCCAAAUGGA | UCCaUUUggaUUaUCaaCaUsU | 234 |
| R-008350583-000D | 936 | 5 | UGUUGAUAAUCCAAAUGGA | B UGUUGAUAAUCCAAAUGGAUsU B | 238 |
| R-008350622-000A | 936 | 5 | UGUUGAUAAUCCAAAUGGA | UCCAuuuGGAuuAucAAcAUsU | 239 |
| R-008350622-000A | 936 | 5 | UGUUGAUAAUCCAAAUGGA | B uGuuGAuAAuccAAAuGGAUsU B | 289 |
| R-008039847-001N | 284 | 25 | GCAAUAACUGUUUGGUAUU | B GcAAuAAcuGuuuGGuAuuTT B | 312 |
| R-008039847-001N | 284 | 25 | GCAAUAACUGUUUGGUAUU | AAUAccAAAcAGuuAuuGcUU | 313 |
| R-008293588-000J | 1267 | 16 | GACGUCUUCUAGAGCCUUU | B GAcGucuucuAGAGccUUUUsU B | 291 |
| R-008293588-000J | 1267 | 16 | GACGUCUUCUAGAGCCUUU | AsAsAsGGCUCUAGAAGACGUCUsU | 314 |
| R-008292823-000W | 1267 | 16 | GACGUCUUCUAGAGCCUUU | B GACGUCUUCUAGAGCCUUUUsU B | 282 |
| R-008292823-000W | 1267 | 16 | GACGUCUUCUAGAGCCUUU | AAsAGGCUCUAGAAGACGUCUsU | 315 |
| R-008358073-000U | 938 | 11 | UUGAUAAUCCAAAUGGAGA | UCUccAuuuGGAuuAucAAUsU | 210 |
| R-008358073-000U | 938 | 11 | UUGAUAAUCCAAAUGGAGA | B uuGAuAAuccAAAuGGAGAUsU B | 316 |
| R-008293563-000F | 1267 | 16 | GACGUCUUCUAGAGCCUUU | B GAcGucuucuAGAGccUUUUsU B | 291 |
| R-008293563-000F | 1267 | 16 | GACGUCUUCUAGAGCCUUU | AsAAGGCUCUAGAAGACGUCUsU | 317 |
| R-008350649-000W | 936 | 5 | UGUUGAUAAUCCAAAUGGA | B UGUUGAUAAUCCAAAUGGAUsU B | 238 |
| R-008350649-000W | 936 | 5 | UGUUGAUAAUCCAAAUGGA | UCCAUUUGGAUUAUCAACAUsU | 318 |
| R-008292771-000F | 1056 | 26 | UGCUGACAUUGAACCCAAA | B UGCUGACAUUGAACCCAAAUsU B | 319 |
| R-008292771-000F | 1056 | 26 | UGCUGACAUUGAACCCAAA | UUsUGGGUUCAAUGUCAGCAUsU | 320 |
| R-008292813-000D | 1267 | 16 | GACGUCUUCUAGAGCCUUU | B GACGUCUUCUAGAGCCUUUUsU B | 282 |
| R-008292813-000D | 1267 | 16 | GACGUCUUCUAGAGCCUUU | AsAsAGGCUCUAGAAGACGUCUsU | 302 |
| R-008053276-001J | 4043 | 27 | CGAAAGCCAUGGUUGCUUG | B cGAAAGccAuGGuuGcuuGTT B | 321 |
| R-008053276-001J | 4043 | 27 | CGAAAGCCAUGGUUGCUUG | CAAGcAAccAuGGcuuucGUU | 322 |
| R-008292765-000Y | 1267 | 16 | GACGUCUUCUAGAGCCUUU | B GACGUCUUCUAGAGCCUUUUsU B | 282 |
| R-008292765-000Y | 1267 | 16 | GACGUCUUCUAGAGCCUUU | AAsAsGGCUCUAGAAGACGUCUsU | 323 |
| R-008350661-000L | 936 | 5 | UGUUGAUAAUCCAAAUGGA | UCCAuuuGGAuuAucAAcAUsU | 239 |
| R-008350661-000L | 936 | 5 | UGUUGAUAAUCCAAAUGGA | B uGuuGAuAAuccAAAuGGAUsU B | 324 |
| R-008242950-000L | 1014 | 28 | UGGAGGUAUACUUCGAAUU | B uGGAGGuAuAcuucGAAuuTT B | 325 |
| R-008242950-000L | 1014 | 28 | UGGAGGUAUACUUCGAAUU | AAUucGAAGuAuAccuccAUU | 326 |
| R-008358057-000U | 965 | 4 | GUGUGACAUGUAUAUAUUA | UAAuAuAuAcAuGucAcAcUsU | 281 |
| R-008358057-000U | 965 | 4 | GUGUGACAUGUAUAUAUUA | B GuGuGAcAuGuAuAuAuuAUsU B | 327 |
| R-008358063-000B | 965 | 4 | GUGUGACAUGUAUAUAUUA | UAAuAuAuAcAuGucAcAcUsU | 281 |
| R-008358063-000B | 965 | 4 | GUGUGACAUGUAUAUAUUA | B GuGuGAcAuGuAuAuAuuATsT B | 328 |
| R-008292777-000H | 1056 | 26 | UGCUGACAUUGAACCCAAA | B UGCUGACAUUGAACCCAAAUsU B | 319 |
| R-008292777-000H | 1056 | 26 | UGCUGACAUUGAACCCAAA | UsUsUsGGGUUCAAUGUCAGCAUsU | 329 |
| R-008293557-000Y | 1267 | 16 | GACGUCUUCUAGAGCCUUU | B GAcGucuucuAGAGccUUUUsU B | 291 |
| R-008293557-000Y | 1267 | 16 | GACGUCUUCUAGAGCCUUU | AAAGGCUCUAGAAGACGUCUsU | 330 |
| R-008350763-000N | 964 | 8 | UGUGUGACAUGUAUAUAUU | AAUaUaUaCaUgUCaCaCaUsU | 207 |
| R-008350763-000N | 964 | 8 | UGUGUGACAUGUAUAUAUU | B uGuGuGAcAuGuAuAuAuuUsU B | 303 |
| R-008293553-000N | 4390 | 21 | GUUGAACUCAAUAAACCUU | B GuuGAAcucAAuAAAcCUUUsU B | 292 |
| R-008293553-000N | 4390 | 21 | GUUGAACUCAAUAAACCUU | AsAGGUUUAUUGAGUUCAACUsU | 331 |
| R-008242887-000P | 908 | 29 | CGGGCAAUGGAACGGGUUA | B cGGGcAAuGGAAcGGGuuATT B | 332 |
| R-008242887-000P | 908 | 29 | CGGGCAAUGGAACGGGUUA | UAAcccGuuccAuuGcccGUU | 333 |
| R-008358055-000B | 938 | 11 | UUGAUAAUCCAAAUGGAGA | B UUGAUAAUCCAAAUGGAGAUsU B | 334 |
| R-008358055-000B | 938 | 11 | UUGAUAAUCCAAAUGGAGA | UCUCCAUUUGGAUUAUCAAUsU | 335 |
| R-008358090-000C | 958 | 9 | GGAAGAUGUGUGACAUGUA | B GGAAGAUGUGUGACAUGUAUsU B | 195 |
| R-008358090-000C | 958 | 9 | GGAAGAUGUGUGACAUGUA | uAcAuGucAcAcAucuuccUsU | 248 |
| R-008242893-000X | 888 | 30 | AGCCAUGGUUGCUUGUUAU | B AGccAuGGuuGcuuGuuAuTT B | 336 |
| R-008242893-000X | 888 | 30 | AGCCAUGGUUGCUUGUUAU | AUAAcAAGcAAccAuGGcuUU | 337 |
| R-008292807-000W | 1267 | 16 | GACGUCUUCUAGAGCCUUU | B GACGUCUUCUAGAGCCUUUUsU B | 282 |
| R-008292807-000W | 1267 | 16 | GACGUCUUCUAGAGCCUUU | AsAAsGGCUCUAGAAGACGUCUsU | 338 |
| R-008293582-000G | 1106 | 18 | GUCGCAACCCUCAUGAAGU | B GucGcAAcccucAuGAAGUUsU B | 284 |
| R-008293582-000G | 1106 | 18 | GUCGCAACCCUCAUGAAGU | acuUCAUGAGGGUUGCGACUsU | 339 |
| R-008350285-000S | 936 | 5 | UGUUGAUAAUCCAAAUGGA | B UGUUGAUAAUCCAAAUGGAUsU B | 238 |
| R-008350285-000S | 936 | 5 | UGUUGAUAAUCCAAAUGGA | UCCAUUUGGAUUAUCAACAUsU | 294 |
| R-008350782-000P | 971 | 10 | CAUGUAUAUAUUAUCUUAA | B CAUGUAUAUAUUAUCUUAAUsU B | 227 |
| R-008350782-000P | 971 | 10 | CAUGUAUAUAUUAUCUUAA | UUAAGAUAAUAUAUACAUGUsU | 340 |
| R-008293590-000G | 1106 | 18 | GUCGCAACCCUCAUGAAGU | B GucGcAAcccucAuGAAGUUsU B | 284 |
| R-008293590-000G | 1106 | 18 | GUCGCAACCCUCAUGAAGU | AcuUCAUGAGGGUUGCGACUsU | 311 |
| R-008293580-000P | 1106 | 18 | GUCGCAACCCUCAUGAAGU | B GucGcAAcccucAuGAAGUUsU B | 284 |
| R-008293580-000P | 1106 | 18 | GUCGCAACCCUCAUGAAGU | AsCsUsUCAUGAGGGUUGCGACUsU | 341 |
| R-008292827-000F | 1267 | 16 | GACGUCUUCUAGAGCCUUU | B GACGUCUUCUAGAGCCUUUUsU B | 282 |
| R-008292827-000F | 1267 | 16 | GACGUCUUCUAGAGCCUUU | AsAAGGCUCUAGAAGACGUCUsU | 317 |
| R-008350685-000F | 964 | 8 | UGUGUGACAUGUAUAUAUU | AAUAUAUACAUGUCACACAUsU | 226 |
| R-008350685-000F | 964 | 8 | UGUGUGACAUGUAUAUAUU | B uGuGuGAcAuGuAuAuAuuUsU B | 303 |
| R-008242881-000M | 1107 | 31 | UCGCAACCCUCAUGAAGUA | B ucGcAAcccucAuGAAGuATT B | 342 |
| R-008242881-000M | 1107 | 31 | UCGCAACCCUCAUGAAGUA | UACuucAuGAGGGuuGcGAUU | 343 |
| R-008053225-001N | 4438 | 32 | AGCCUUUGAUCCAGCAAUA | B AGccuuuGAuccAGcAAuATT B | 344 |
| R-008053225-001N | 4438 | 32 | AGCCUUUGAUCCAGCAAUA | UAUuGcuGGAucAAAGGcuUU | 345 |
| R-008357989-000G | 965 | 4 | GUGUGACAUGUAUAUAUUA | B GUGUGACAUGUAUAUAUUAUsU B | 265 |
| R-008357989-000G | 965 | 4 | GUGUGACAUGUAUAUAUUA | U AAuAuAuAcAuGucAcAcUsU | 281 |
| R-008242917-000C | 1106 | 18 | GUCGCAACCCUCAUGAAGU | ACUucAuGAGGGuuGcGAcUU | 275 |
| R-008242917-000C | 1106 | 18 | GUCGCAACCCUCAUGAAGU | B GucGcAAcccucAuGAAGuTT B | 346 |
| R-008293544-000E | 1267 | 16 | GACGUCUUCUAGAGCCUUU | B GACGUCUUCUAGAGCCUUUUsU B | 282 |
| R-008293544-000E | 1267 | 16 | GACGUCUUCUAGAGCCUUU | AAAGGCUCUAGAAGACGUCUsU | 330 |
| R-008039846-001E | 196 | 33 | CAUUGAACCCAAAUUUGAU | B cAuuGAAcccAAAuuuGAuTT B | 347 |
| R-008039846-001E | 196 | 33 | CAUUGAACCCAAAUUUGAU | AUCAAAuuuGGGuucAAuGUU | 348 |
| R-008293564-000P | 1056 | 26 | UGCUGACAUUGAACCCAAA | B uGcuGAcAuuGAAcccAAAUsU B | 349 |
| R-008293564-000P | 1056 | 26 | UGCUGACAUUGAACCCAAA | UsUUGGGUUCAAUGUCAGCAUsU | 350 |
| R-008293591-000R | 1056 | 26 | UGCUGACAUUGAACCCAAA | B uGcuGAcAuuGAAcccAAAUsU B | 349 |
| R-008293591-000R | 1056 | 26 | UGCUGACAUUGAACCCAAA | uuuGGGUUCAAUGUCAGCAUsU | 351 |
| R-008293584-000Z | 1267 | 16 | GACGUCUUCUAGAGCCUUU | B GACGUCUUCUAGAGCCUUUUsU B | 282 |
| R-008293584-000Z | 1267 | 16 | GACGUCUUCUAGAGCCUUU | aaaGGCUCUAGAAGACGUCUsU | 290 |
| R-008292809-000N | 1056 | 26 | UGCUGACAUUGAACCCAAA | B UGCUGACAUUGAACCCAAAUsU B | 319 |
| R-008292809-000N | 1056 | 26 | UGCUGACAUUGAACCCAAA | UUsUsGGGUUCAAUGUCAGCAUsU | 352 |
| R-008292785-000H | 1106 | 18 | GUCGCAACCCUCAUGAAGU | B GUCGCAACCCUCAUGAAGUUsU B | 274 |
| R-008292785-000H | 1106 | 18 | GUCGCAACCCUCAUGAAGU | ACsUUCAUGAGGGUUGCGACUsU | 353 |
| R-008358091-000L | 938 | 11 | UUGAUAAUCCAAAUGGAGA | B UUGAUAAUCCAAAUGGAGAUsU B | 229 |
| R-008358091-000L | 938 | 11 | UUGAUAAUCCAAAUGGAGA | UCUCCAUUUGGAUUAUCAAUsU | 354 |
| R-008242830-000S | 994 | 34 | GACUGGGAUGCCAAGGUAA | B GAcuGGGAuGccAAGGuAATT B | 355 |
| R-008242830-000S | 994 | 34 | GACUGGGAUGCCAAGGUAA | UUAccuuGGcAucccAGucUU | 356 |
| R-008293556-000P | 4390 | 21 | GUUGAACUCAAUAAACCUU | B GuuGAAcucAAuAAAcCUUUsU B | 292 |
| R-008293556-000P | 4390 | 21 | GUUGAACUCAAUAAACCUU | AsAsGsGUUUAUUGAGUUCAACUsU | 357 |
| R-008358023-000G | 938 | 11 | UUGAUAAUCCAAAUGGAGA | B UUGAUAAUCCAAAUGGAGAUsU B | 209 |
| R-008358023-000G | 938 | 11 | UUGAUAAUCCAAAUGGAGA | UCUCCAUUUGGAUUAUCAAUsU | 354 |
| R-008292787-000A | 1056 | 26 | UGCUGACAUUGAACCCAAA | B UGCUGACAUUGAACCCAAAUsU B | 319 |
| R-008292787-000A | 1056 | 26 | UGCUGACAUUGAACCCAAA | UsUUGGGUUCAAUGUCAGCAUsU | 350 |
| R-008053260-001P | 4323 | 35 | GUAUUUUGAUGCAGAUGAG | B GuAuuuuGAuGcAGAuGAGTT B | 358 |
| R-008053260-001P | 4323 | 35 | GUAUUUUGAUGCAGAUGAG | CUCAucuGcAucAAAAuAcUU | 359 |
| R-008242836-000U | 1055 | 36 | UUGCUGACAUUGAACCCAA | B uuGcuGAcAuuGAAcccAATT B | 360 |
| R-008242836-000U | 1055 | 36 | UUGCUGACAUUGAACCCAA | UUGGGuucAAuGucAGcAAUU | 361 |
| R-008358083-000L | 965 | 4 | GUGUGACAUGUAUAUAUUA | B GuGuGAcAuGuAuAuAuuAUsU B | 180 |
| R-008358083-000L | 965 | 4 | GUGUGACAUGUAUAUAUUA | UAAuAuAuAcAuGucAcAcUsU | 281 |
| R-008242941-000C | 1223 | 37 | GUGUGAGGGUUGAACUCAA | B GuGuGAGGGuuGAAcucAATT B | 362 |
| R-008242941-000C | 1223 | 37 | GUGUGAGGGUUGAACUCAA | UUGAGuucAAcccucAcAcUU | 363 |
| R-008350791-000Y | 955 | 7 | GAUGGAAGAUGUGUGACAU | AUGucAcAcAucuuccAucUsU | 219 |
| R-008350791-000Y | 955 | 7 | GAUGGAAGAUGUGUGACAU | B GAuGGAAGAuGuGuGAcAuUsU B | 267 |
| R-008292817-000N | 1106 | 18 | GUCGCAACCCUCAUGAAGU | B GUCGCAACCCUCAUGAAGUUsU B | 274 |
| R-008292817-000N | 1106 | 18 | GUCGCAACCCUCAUGAAGU | AsCsUUCAUGAGGGUUGCGACUsU | 310 |
| R-008358060-000A | 965 | 4 | GUGUGACAUGUAUAUAUUA | B GUGUGACAUGUAUAUAUUAUsU B | 225 |
| R-008358060-000A | 965 | 4 | GUGUGACAUGUAUAUAUUA | UAAUaUaUaCaUgUCaCaCUsU | 364 |
| R-008292805-000D | 1056 | 26 | UGCUGACAUUGAACCCAAA | B UGCUGACAUUGAACCCAAAUsU B | 319 |
| R-008292805-000D | 1056 | 26 | UGCUGACAUUGAACCCAAA | UUUGGGUUCAAUGUCAGCAUsU | 365 |
| R-008350609-000B | 936 | 5 | UGUUGAUAAUCCAAAUGGA | B UGUUGAUAAUCCAAAUGGAUsU B | 233 |
| R-008350609-000B | 936 | 5 | UGUUGAUAAUCCAAAUGGA | UCCAUUUGGAUUAUCAACAUsU | 318 |
| R-008242857-000M | 920 | 38 | CGGGUUAUGUACGUCAUGU | B cGGGuuAuGuAcGucAuGuTT B | 366 |
| R-008242857-000M | 920 | 38 | CGGGUUAUGUACGUCAUGU | ACAuGAcGuAcAuAAcccGUU | 367 |
| R-008350610-000R | 936 | 5 | UGUUGAUAAUCCAAAUGGA | uccAuuuGGAuuAucAAcAUsU | 232 |
| R-008350610-000R | 936 | 5 | UGUUGAUAAUCCAAAUGGA | B uGuuGAuAAuccAAAuGGAUsU B | 289 |
| R-008292767-000R | 1056 | 26 | UGCUGACAUUGAACCCAAA | B UGCUGACAUUGAACCCAAAUsU B | 319 |
| R-008292767-000R | 1056 | 26 | UGCUGACAUUGAACCCAAA | UsUsUGGGUUCAAUGUCAGCAUsU | 368 |
| R-008293576-000Z | 1056 | 26 | UGCUGACAUUGAACCCAAA | B uGcuGAcAuuGAAcccAAAUsU B | 349 |
| R-008293576-000Z | 1056 | 26 | UGCUGACAUUGAACCCAAA | UUUGGGuucAAuGucAGcAUU | 369 |
| R-008350326-000F | 964 | 8 | UGUGUGACAUGUAUAUAUU | AAuAuAuAcAuGucAcAcAUsU | 191 |
| R-008350326-000F | 964 | 8 | UGUGUGACAUGUAUAUAUU | B uGuGuGAcAuGuAuAuAuuUsU B | 303 |
| R-008242773-000C | 931 | 39 | CGUCAUGUUGAUAAUCCAA | B cGucAuGuuGAuAAuccAATT B | 370 |
| R-008242773-000C | 931 | 39 | CGUCAUGUUGAUAAUCCAA | UUGGAuuAucAAcAuGAcGUU | 371 |
| R-008350746-000E | 971 | 10 | CAUGUAUAUAUUAUCUUAA | B CAUGUAUAUAUUAUCUUAAUsU B | 200 |
| R-008350746-000E | 971 | 10 | CAUGUAUAUAUUAUCUUAA | UUAAGAUAAUAUAUACAUGUsU | 340 |
| R-008053257-001H | 4604 | 40 | GUGACUUUGUACUGCAUGA | B GuGAcuuuGuAcuGcAuGATT B | 372 |
| R-008053257-001H | 4604 | 40 | GUGACUUUGUACUGCAUGA | UCAuGcAGuAcAAAGucAcUU | 373 |
| R-008358052-000A | 938 | 11 | UUGAUAAUCCAAAUGGAGA | UCUccAuuuGGAuuAucAAUsU | 210 |
| R-008358052-000A | 938 | 11 | UUGAUAAUCCAAAUGGAGA | B uuGAuAAuccAAAuGGAGAUsU B | 308 |
| R-008242911-000A | 1006 | 41 | AAGGUAAGUGGAGGUAUAC | B AAGGuAAGuGGAGGuAuAcTT B | 374 |
| R-008242911-000A | 1006 | 41 | AAGGUAAGUGGAGGUAUAC | GUAuAccuccAcuuAccuuUU | 375 |
| R-008350776-000G | 962 | 1 | GAUGUGUGACAUGUAUAUA | B GAUGUGUGACAUGUAUAUAUsU B | 170 |
| R-008350776-000G | 962 | 1 | GAUGUGUGACAUGUAUAUA | UAUAUACAUGUCACACAUCUsU | 376 |
| R-008053204-001V | 4297 | 42 | GCUACAAGGUACGCAAUAA | B GcuAcAAGGuAcGcAAuAATT B | 377 |
| R-008053204-001V | 4297 | 42 | GCUACAAGGUACGCAAUAA | UUAuuGcGuAccuuGuAGcUU | 378 |
| R-008350790-000P | 955 | 7 | GAUGGAAGAUGUGUGACAU | B GAUGGAAGAUGUGUGACAUUsU B | 188 |
| R-008350790-000P | 955 | 7 | GAUGGAAGAUGUGUGACAU | AUGUCaCaCaUCUUCCaUCUsU | 379 |
| R-008350801-000B | 962 | 1 | GAUGUGUGACAUGUAUAUA | B GAUGUGUGACAUGUAUAUAUsU B | 174 |
| R-008350801-000B | 962 | 1 | GAUGUGUGACAUGUAUAUA | UAUAUACAUGUCACACAUCUsU | 376 |
| R-008053275-001A | 4379 | 43 | AAGGUGUGAGGGUUGAACU | B AAGGuGuGAGGGuuGAAcuTT B | 380 |
| R-008053275-001A | 4379 | 43 | AAGGUGUGAGGGUUGAACU | AGUucAAcccucAcAccuuUU | 381 |
| R-008053203-001L | 4790 | 44 | CAAGUUUGAAUUUGGGAUA | B cAAGuuuGAAuuuGGGAuATT B | 382 |
| R-008053203-001L | 4790 | 44 | CAAGUUUGAAUUUGGGAUA | UAUcccAAAuucAAAcuuGUU | 383 |
| R-008292783-000R | 1106 | 18 | GUCGCAACCCUCAUGAAGU | B GUCGCAACCCUCAUGAAGUUsU B | 274 |
| R-008292783-000R | 1106 | 18 | GUCGCAACCCUCAUGAAGU | ACsUsUCAUGAGGGUUGCGACUsU | 384 |
| R-008350755-000N | 962 | 1 | GAUGUGUGACAUGUAUAUA | B GAUGUGUGACAUGUAUAUAUsU B | 170 |
| R-008350755-000N | 962 | 1 | GAUGUGUGACAUGUAUAUA | UAUaUaCaUgUCaCaCaUCUsU | 385 |
| R-008292797-000T | 1056 | 26 | UGCUGACAUUGAACCCAAA | B UGCUGACAUUGAACCCAAAUsU B | 319 |
| R-008292797-000T | 1056 | 26 | UGCUGACAUUGAACCCAAA | UsUUsGGGUUCAAUGUCAGCAUsU | 386 |
| R-008358012-000F | 958 | 9 | GGAAGAUGUGUGACAUGUA | uAcAuGucAcAcAucuuccUsU | 248 |
| R-008358012-000F | 958 | 9 | GGAAGAUGUGUGACAUGUA | B GGAAGAuGuGuGAcAuGuAUsU B | 260 |
| R-008053233-001N | 4268 | 45 | GCAACCCUCAUGAAGUACA | B GcAAcccucAuGAAGuAcATT B | 387 |
| R-008053233-001N | 4268 | 45 | GCAACCCUCAUGAAGUACA | UGUAcuucAuGAGGGuuGcUU | 388 |
| R-008292821-000D | 1106 | 18 | GUCGCAACCCUCAUGAAGU | B GUCGCAACCCUCAUGAAGUUsU B | 274 |
| R-008292821-000D | 1106 | 18 | GUCGCAACCCUCAUGAAGU | AsCUsUCAUGAGGGUUGCGACUsU | 389 |
| R-008292793-000H | 1106 | 18 | GUCGCAACCCUCAUGAAGU | B GUCGCAACCCUCAUGAAGUUsU B | 274 |
| R-008292793-000H | 1106 | 18 | GUCGCAACCCUCAUGAAGU | AsCsUsUCAUGAGGGUUGCGACUsU | 341 |
| R-008293559-000R | 1106 | 18 | GUCGCAACCCUCAUGAAGU | ACUUcAuGAGGGuuGcGAcUU | 275 |
| R-008293559-000R | 1106 | 18 | GUCGCAACCCUCAUGAAGU | B GucGcAAcccucAuGAAGUUsU B | 284 |
| R-008358026-000H | 965 | 4 | GUGUGACAUGUAUAUAUUA | B GuGuGAcAuGuAuAuAuuAUsU B | 180 |
| R-008358026-000H | 965 | 4 | GUGUGACAUGUAUAUAUUA | UAAUaUaUaCaUgUCaCaCUsU | 364 |
| R-008293589-000T | 1056 | 26 | UGCUGACAUUGAACCCAAA | UsUsUsGGGUUCAAUGUCAGCAUsU | 329 |
| R-008293589-000T | 1056 | 26 | UGCUGACAUUGAACCCAAA | B uGcuGAcAuuGAAcccAAAUsU B | 349 |
| R-008293577-000H | 4390 | 21 | GUUGAACUCAAUAAACCUU | B GuuGAAcucAAuAAAcCUUUsU B | 292 |
| R-008293577-000H | 4390 | 21 | GUUGAACUCAAUAAACCUU | AAGGuuuAuuGAGuucAAcUU | 299 |
| R-008358020-000F | 938 | 11 | UUGAUAAUCCAAAUGGAGA | B UUGAUAAUCCAAAUGGAGAUsU B | 229 |
| R-008358020-000F | 938 | 11 | UUGAUAAUCCAAAUGGAGA | UCUCCaUUUggaUUaUCaaUsU | 390 |
| R-008350288-000T | 936 | 5 | UGUUGAUAAUCCAAAUGGA | B uGuuGAuAAuccAAAuGGAUsU B | 289 |
| R-008350288-000T | 936 | 5 | UGUUGAUAAUCCAAAUGGA | UCCAUUUGGAUUAUCAACAUsU | 318 |
| R-008053249-001H | 4226 | 46 | AACCCAAAUUUGAUAGACU | B AAcccAAAuuuGAuAGAcuTT B | 391 |
| R-008053249-001H | 4226 | 46 | AACCCAAAUUUGAUAGACU | AGUcuAucAAAuuuGGGuuUU | 392 |
| R-008293561-000N | 1056 | 26 | UGCUGACAUUGAACCCAAA | B uGcuGAcAuuGAAcccAAAUsU B | 349 |
| R-008293561-000N | 1056 | 26 | UGCUGACAUUGAACCCAAA | UsUsUGGGUUCAAUGUCAGCAUsU | 368 |
| R-008053226-001X | 4308 | 47 | CGCAAUAACUGUUUGGUAU | B cGcAAuAAcuGuuuGGuAuTT B | 393 |
| R-008053226-001X | 4308 | 47 | CGCAAUAACUGUUUGGUAU | AUAccAAAcAGuuAuuGcGUU | 394 |
| R-008053205-001D | 4336 | 48 | GAUGAGAGAGCACGAGCUA | B GAuGAGAGAGcAcGAGcuATT B | 395 |
| R-008053205-001D | 4336 | 48 | GAUGAGAGAGCACGAGCUA | U AGcucGuGcucucucAucUU | 396 |
| R-008242794-000W | 924 | 49 | UUAUGUACGUCAUGUUGAU | B uuAuGuAcGucAuGuuGAuTT B | 397 |
| R-008242794-000W | 924 | 49 | UUAUGUACGUCAUGUUGAU | AUCAAcAuGAcGuAcAuAAUU | 398 |
| R-008350653-000L | 962 | 1 | GAUGUGUGACAUGUAUAUA | UAUAuAcAuGucAcAcAucUsU | 171 |
| R-008350653-000L | 962 | 1 | GAUGUGUGACAUGUAUAUA | B GAuGuGuGAcAuGuAuAuAUsU B | 399 |
| R-008292795-000A | 1267 | 16 | GACGUCUUCUAGAGCCUUU | B GACGUCUUCUAGAGCCUUUUsU B | 282 |
| R-008292795-000A | 1267 | 16 | GACGUCUUCUAGAGCCUUU | AsAsAsGGCUCUAGAAGACGUCUsU | 314 |
| R-008053208-001E | 4341 | 50 | GAGAGCACGAGCUAAAGUA | B GAGAGcAcGAGcuAAAGuATT B | 400 |
| R-008053208-001E | 4341 | 50 | GAGAGCACGAGCUAAAGUA | U ACuuuAGcucGuGcucucUU | 401 |
| R-008242803-000R | 1056 | 26 | UGCUGACAUUGAACCCAAA | UUUGGGuucAAuGucAGcAUU | 369 |
| R-008242803-000R | 1056 | 26 | UGCUGACAUUGAACCCAAA | B uGcuGAcAuuGAAcccAAATT B | 402 |
| R-008293555-000F | 1056 | 26 | UGCUGACAUUGAACCCAAA | B uGcuGAcAuuGAAcccAAAUsU B | 349 |
| R-008293555-000F | 1056 | 26 | UGCUGACAUUGAACCCAAA | UUUGGGUUCAAUGUCAGCAUsU | 365 |
| R-008358027-000S | 965 | 4 | GUGUGACAUGUAUAUAUUA | B GUGUGACAUGUAUAUAUUAUsU B | 265 |
| R-008358027-000S | 965 | 4 | GUGUGACAUGUAUAUAUUA | UAAUaUaUaCaUgUCaCaCUsU | 364 |
| R-008242779-000E | 1115 | 51 | CUCAUGAAGUACAACCAGC | B cucAuGAAGuAcAAccAGcTT B | 403 |
| R-008242779-000E | 1115 | 51 | CUCAUGAAGUACAACCAGC | GCUGGuuGuAcuucAuGAGUU | 404 |
| R-008293583-000R | 1106 | 18 | GUCGCAACCCUCAUGAAGU | B GUCGCAACCCUCAUGAAGUUsU B | 274 |
| R-008293583-000R | 1106 | 18 | GUCGCAACCCUCAUGAAGU | acuUCAUGAGGGUUGCGACUsU | 339 |
| R-008350741-000L | 955 | 7 | GAUGGAAGAUGUGUGACAU | AUGUCACACAUCUUCCAUCUsU | 224 |
| R-008350741-000L | 955 | 7 | GAUGGAAGAUGUGUGACAU | B GAuGGAAGAuGuGuGAcAuUsU B | 267 |
| R-008039848-001X | 4295 | 52 | AUGCUACAAGGUACGCAAU | B AuGcuAcAAGGuAcGcAAuTT B | 405 |
| R-008039848-001X | 4295 | 52 | AUGCUACAAGGUACGCAAU | AUUGcGuAccuuGuAGcAuUU | 406 |
| R-008350787-000H | 962 | 1 | GAUGUGUGACAUGUAUAUA | UAUAUACAUGUCACACAUCUsU | 376 |
| R-008350787-000H | 962 | 1 | GAUGUGUGACAUGUAUAUA | B GAuGuGuGAcAuGuAuAuAUsU B | 399 |
| R-008053238-001G | 4217 | 53 | CUGACAUUGAACCCAAAUU | B cuGAcAuuGAAcccAAAuuTT B | 407 |
| R-008053238-001G | 4217 | 53 | CUGACAUUGAACCCAAAUU | AAUuuGGGuucAAuGucAGUU | 408 |
| R-008053242-001X | 4206 | 54 | AGCCCAGUUUGCUGACAUU | B AGcccAGuuuGcuGAcAuuTT B | 409 |
| R-008053242-001X | 4206 | 54 | AGCCCAGUUUGCUGACAUU | AAUGucAGcAAAcuGGGcuUU | 410 |
| R-008358022-000Y | 938 | 11 | UUGAUAAUCCAAAUGGAGA | B uuGAuAAuccAAAuGGAGAUsU B | 308 |
| R-008358022-000Y | 938 | 11 | UUGAUAAUCCAAAUGGAGA | UCUCCAUUUGGAUUAUCAAUsU | 354 |
| R-008242947-000E | 1048 | 55 | GCCCAGUUUGCUGACAUUG | B GcccAGuuuGcuGAcAuuGTT B | 411 |
| R-008242947-000E | 1048 | 55 | GCCCAGUUUGCUGACAUUG | CAAuGucAGcAAAcuGGGcUU | 412 |
| R-008242761-000T | 786 | 56 | GCCCGGCUGCGAAACCAUU | B GcccGGcuGcGAAAccAuuTT B | 413 |
| R-008242761-000T | 786 | 56 | GCCCGGCUGCGAAACCAUU | AAUGGuuucGcAGccGGGcUU | 414 |
| R-008292801-000U | 1106 | 18 | GUCGCAACCCUCAUGAAGU | B GUCGCAACCCUCAUGAAGUUsU B | 274 |
| R-008292801-000U | 1106 | 18 | GUCGCAACCCUCAUGAAGU | AsCUUCAUGAGGGUUGCGACUsU | 285 |
| R-008053246-001G | 4823 | 57 | GGUACAAUUUAUCUAAACU | B GGuAcAAuuuAucuAAAcuTT B | 415 |
| R-008053246-001G | 4823 | 57 | GGUACAAUUUAUCUAAACU | AGUuuAGAuAAAuuGuAccUU | 416 |
| R-008358070-000T | 965 | 4 | GUGUGACAUGUAUAUAUUA | B GUGUGACAUGUAUAUAUUAUsU B | 225 |
| R-008358070-000T | 965 | 4 | GUGUGACAUGUAUAUAUUA | UAAUAUAUACAUGUCACACUsU | 417 |
| R-008350745-000W | 971 | 10 | CAUGUAUAUAUUAUCUUAA | B cAuGuAuAuAuuAucuuAAUsU B | 235 |
| R-008350745-000W | 971 | 10 | CAUGUAUAUAUUAUCUUAA | UUAAGAUAAUAUAUACAUGUsU | 340 |
| R-008358018-000H | 938 | 11 | UUGAUAAUCCAAAUGGAGA | B UUGAUAAUCCAAAUGGAGAUsU B | 209 |
| R-008358018-000H | 938 | 11 | UUGAUAAUCCAAAUGGAGA | UCUCCaUUUggaUUaUCaaUsU | 390 |
| R-008242734-000S | 1110 | 58 | CAACCCUCAUGAAGUACAA | B cAAcccucAuGAAGUAcAATT B | 418 |
| R-008242734-000S | 1110 | 58 | CAACCCUCAUGAAGUACAA | UUGuAcuucAuGAGGGuuGUU | 419 |
| R-008293578-000S | 1106 | 18 | GUCGCAACCCUCAUGAAGU | B GucGcAAcccucAuGAAGUUsU B | 284 |
| R-008293578-000S | 1106 | 18 | GUCGCAACCCUCAUGAAGU | ACUUCAUGAGGGUUGCGACUsU | 420 |
| R-008293586-000S | 1056 | 26 | UGCUGACAUUGAACCCAAA | B UGCUGACAUUGAACCCAAAUsU B | 319 |
| R-008293586-000S | 1056 | 26 | UGCUGACAUUGAACCCAAA | uuuGGGUUCAAUGUCAGCAUsU | 351 |
| R-008242908-000U | 1272 | 59 | CUUCUAGAGCCUUUGAUCC | B cuucuAGAGccuuuGAuccTT B | 421 |
| R-008242908-000U | 1272 | 59 | CUUCUAGAGCCUUUGAUCC | GGAucAAAGGcucuAGAAGUU | 422 |
| R-008350767-000Y | 955 | 7 | GAUGGAAGAUGUGUGACAU | B GAUGGAAGAUGUGUGACAUUsU B | 192 |
| R-008350767-000Y | 955 | 7 | GAUGGAAGAUGUGUGACAU | AuGucAcAcAucuuccAucUsU | 264 |
| R-008242884-000N | 881 | 60 | GGACGAAAGCCAUGGUUGC | B GGAcGAAAGccAuGGuuGcTT B | 423 |
| R-008242884-000N | 881 | 60 | GGACGAAAGCCAUGGUUGC | GCAAccAuGGcuuucGuccUU | 424 |
| R-008242944-000D | 1229 | 61 | GGGUUGAACUCAAUAAACC | B GGGuuGAAcucAAuAAAccTT B | 425 |
| R-008242944-000D | 1229 | 61 | GGGUUGAACUCAAUAAACC | GGUuuAuuGAGuucAAcccUU | 426 |
| R-008053216-001E | 3914 | 62 | GCGAUAAGAUCACCUGGAU | B GcGAuAAGAucAccuGGAuTT B | 427 |
| R-008053216-001E | 3914 | 62 | GCGAUAAGAUCACCUGGAU | AUCcAGGuGAucuuAucGcUU | 428 |
| R-008350713-000B | 962 | 1 | GAUGUGUGACAUGUAUAUA | B GAUGUGUGACAUGUAUAUAUsU B | 429 |
| R-008350713-000B | 962 | 1 | GAUGUGUGACAUGUAUAUA | UAUAUACAUGUCACACAUCUsU | 430 |
| R-008242929-000M | 1224 | 63 | UGUGAGGGUUGAACUCAAU | B uGuGAGGGuuGAAcucAAuTT B | 431 |
| R-008242929-000M | 1224 | 63 | UGUGAGGGUUGAACUCAAU | AUUGAGuucAAcccucAcAUU | 432 |
| R-008350798-000J | 964 | 8 | UGUGUGACAUGUAUAUAUU | B UGUGUGACAUGUAUAUAUUUsU B | 208 |
| R-008350798-000J | 964 | 8 | UGUGUGACAUGUAUAUAUU | AAUaUaUaCaUgUCaCaCaUsU | 433 |
| R-008053218-001X | 4814 | 64 | UCUAUAUUAGGUACAAUUU | B ucuAuAuuAGGuAcAAuuuTT B | 434 |
| R-008053218-001X | 4814 | 64 | UCUAUAUUAGGUACAAUUU | AAAuuGuAccuAAuAuAGAUU | 435 |
| R-008242821-000H | 1135 | 65 | UAUGCUACAAGGUACGCAA | B uAuGcuAcAAGGuAcGcAATT B | 436 |
| R-008242821-000H | 1135 | 65 | UAUGCUACAAGGUACGCAA | UUGcGuAccuuGuAGcAuAUU | 437 |
| R-008350690-000E | 964 | 8 | UGUGUGACAUGUAUAUAUU | B UGUGUGACAUGUAUAUAUUUsU B | 206 |
| R-008350690-000E | 964 | 8 | UGUGUGACAUGUAUAUAUU | AAUaUaUaCaUgUCaCaCaUsU | 433 |
| R-008291295-000G | 1106 | 18 | GUCGCAACCCUCAUGAAGU | B GUCGCAACCCUCAUGAAGUUsU B | 274 |
| R-008291295-000G | 1106 | 18 | GUCGCAACCCUCAUGAAGU | ACUUCAUGAGGGUUGCGACUU | 438 |
| R-008053222-001M | 4418 | 66 | UCGGUAAAGACGUCUUCUA | B ucGGuAAAGAcGucuucuATT B | 439 |
| R-008053222-001M | 4418 | 66 | UCGGUAAAGACGUCUUCUA | UAGAAGAcGucuuuAccGAUU | 440 |
| R-008291276-000F | 4390 | 21 | GUUGAACUCAAUAAACCUU | B GUUGAACUCAAUAAACCUUCsA B | 441 |
| R-008291276-000F | 4390 | 21 | GUUGAACUCAAUAAACCUU | GUAAGGUUUAUUGAGUUCAACCsC | 442 |
| R-008358081-000U | 938 | 11 | UUGAUAAUCCAAAUGGAGA | B uuGAuAAuccAAAuGGAGAUsU B | 308 |
| R-008358081-000U | 938 | 11 | UUGAUAAUCCAAAUGGAGA | UCUCCaUUUggaUUaUCaaUsU | 390 |
| R-008242863-000V | 1013 | 67 | GUGGAGGUAUACUUCGAAU | B GuGGAGGuAuAcuucGAAuTT B | 443 |
| R-008242863-000V | 1013 | 67 | GUGGAGGUAUACUUCGAAU | AUUcGAAGuAuAccuccAcUU | 444 |
| R-008358092-000V | 938 | 11 | UUGAUAAUCCAAAUGGAGA | B uuGAuAAuccAAAuGGAGAUsU B | 308 |
| R-008358092-000V | 938 | 11 | UUGAUAAUCCAAAUGGAGA | UCUCCAUUUGGAUUAUCAAUsU | 309 |
| R-008053215-001W | 4342 | 68 | AGAGCACGAGCUAAAGUAA | B AGAGcAcGAGcuAAAGuAATT B | 445 |
| R-008053215-001W | 4342 | 68 | AGAGCACGAGCUAAAGUAA | UUAcuuuAGcucGuGcucuUU | 446 |
| R-008293579-000A | 1267 | 16 | GACGUCUUCUAGAGCCUUU | B GAcGucuucuAGAGccUUUUsU B | 291 |
| R-008293579-000A | 1267 | 16 | GACGUCUUCUAGAGCCUUU | AAAGGCUCUAGAAGACGUCUsU | 447 |
| R-008291305-000K | 1056 | 26 | UGCUGACAUUGAACCCAAA | B UGCUGACAUUGAACCCAAAUsU B | 319 |
| R-008291305-000K | 1056 | 26 | UGCUGACAUUGAACCCAAA | UUUGGGUUCAAUGUCAGCAUsU | 448 |
| R-008242860-000U | 1180 | 69 | GAGAGAGCACGAGCUAAAG | B GAGAGAGcAcGAGcuAAAGTT B | 449 |
| R-008242860-000U | 1180 | 69 | GAGAGAGCACGAGCUAAAG | CUUuAGcucGuGcucucucUU | 450 |
| R-008242839-000V | 1227 | 70 | GAGGGUUGAACUCAAUAAA | B GAGGGuuGAAcucAAuAAATT B | 451 |
| R-008242839-000V | 1227 | 70 | GAGGGUUGAACUCAAUAAA | UUUAuuGAGuucAAcccucUU | 452 |
| R-008053270-001G | 4227 | 71 | ACCCAAAUUUGAUAGACUG | B AcccAAAuuuGAuAGAcuGTT B | 453 |
| R-008053270-001G | 4227 | 71 | ACCCAAAUUUGAUAGACUG | CAGucuAucAAAuuuGGGuUU | 454 |
| R-008293552-000E | 1267 | 16 | GACGUCUUCUAGAGCCUUU | B GACGUCUUCUAGAGCCUUUUsU B | 282 |
| R-008293552-000E | 1267 | 16 | GACGUCUUCUAGAGCCUUU | AAAGGcucuAGAAGAcGucUU | 455 |
| R-008053206-001M | 4054 | 72 | GUUGCUUGUUAUCCGGGCA | B GuuGcuuGuuAuccGGGcATT B | 456 |
| R-008053206-001M | 4054 | 72 | GUUGCUUGUUAUCCGGGCA | UGCccGGAuAAcAAGcAAcUU | 457 |
| R-008291293-000P | 1106 | 18 | GUCGCAACCCUCAUGAAGU | B GUCGCAACCCUCAUGAAGUUsU B | 274 |
| R-008291293-000P | 1106 | 18 | GUCGCAACCCUCAUGAAGU | AsCsUsUCAUGAGGGUUGCGACUU | 458 |
| R-008242743-000A | 961 | 73 | AGAUGUGUGACAUGUAUAU | B AGAuGuGuGAcAuGuAuAuTT B | 459 |
| R-008242743-000A | 961 | 73 | AGAUGUGUGACAUGUAUAU | AUAuAcAuGucAcAcAucuUU | 460 |
| R-008242899-000Z | 610 | 74 | CACGGCAUCUGUGUGGUGG | B cAcGGcAucuGuGuGGuGGTT B | 461 |
| R-008242899-000Z | 610 | 74 | CACGGCAUCUGUGUGGUGG | CCAccAcAcAGAuGccGuGUU | 462 |
| R-008350783-000Y | 971 | 10 | CAUGUAUAUAUUAUCUUAA | B cAuGuAuAuAuuAucuuAAUsU B | 235 |
| R-008350783-000Y | 971 | 10 | CAUGUAUAUAUUAUCUUAA | UUAagaUaaUaUaUaCaUgUsU | 463 |
| R-008350736-000M | 971 | 10 | CAUGUAUAUAUUAUCUUAA | B CAUGUAUAUAUUAUCUUAAUsU B | 464 |
| R-008350736-000M | 971 | 10 | CAUGUAUAUAUUAUCUUAA | UUAAGAUAAUAUAUACAUGUSU | 465 |
| R-008350703-000J | 962 | 1 | GAUGUGUGACAUGUAUAUA | B GAUGUGUGACAUGUAUAUAUsU B | 170 |
| R-008350703-000J | 962 | 1 | GAUGUGUGACAUGUAUAUA | UAUAUACAUGUCACACAUCUsU | 466 |
| R-008357997-000G | 965 | 4 | GUGUGACAUGUAUAUAUUA | B GUGUGACAUGUAUAUAUUAUsU B | 265 |
| R-008357997-000G | 965 | 4 | GUGUGACAUGUAUAUAUUA | UAAUAUAUACAUGUCACACUsU | 417 |
| R-008291279-000G | 1056 | 26 | UGCUGACAUUGAACCCAAA | B UGCUGACAUUGAACCCAAAUsU B | 319 |
| R-008291279-000G | 1056 | 26 | UGCUGACAUUGAACCCAAA | UsUsUsGGGUUCAAUGUCAGCAUsU | 467 |
| R-008053258-001S | 4307 | 75 | ACGCAAUAACUGUUUGGUA | B AcGcAAuAAcuGuuuGGuATT B | 468 |
| R-008053258-001S | 4307 | 75 | ACGCAAUAACUGUUUGGUA | UACcAAAcAGuuAuuGcGuUU | 469 |
| R-008039882-001P | 4126 | 76 | GUGACAUGUAUAUAUUAUC | B GuGAcAuGuAuAuAuuAucTT B | 470 |
| R-008039882-001P | 4126 | 76 | GUGACAUGUAUAUAUUAUC | GAUAAuAuAuAcAuGucAcUU | 471 |
| R-008053217-001N | 4700 | 77 | AUAAGUGCCCUGUGUAGAA | B AuAAGuGcccuGuGuAGAATT B | 472 |
| R-008053217-001N | 4700 | 77 | AUAAGUGCCCUGUGUAGAA | UUCuAcAcAGGGcAcuuAuUU | 473 |
| R-008293550-000M | 4390 | 21 | GUUGAACUCAAUAAACCUU | B GuuGAAcucAAuAAAcCUUUsU B | 292 |
| R-008293550-000M | 4390 | 21 | GUUGAACUCAAUAAACCUU | AAGGUUUAUUGAGUUCAACUsU | 474 |
| R-008053274-001S | 3750 | 78 | CGUGCCGUGCAUGAACAAG | B cGuGccGuGcAuGAAcAAGTT B | 475 |
| R-008053274-001S | 3750 | 78 | CGUGCCGUGCAUGAACAAG | CUUGuucAuGcAcGGcAcGUU | 476 |
| R-008053259-001A | 4352 | 79 | CUAAAGUAAAAUAUCUAAC | B CuAAAGuAAAAuAucuAAcTT B | 477 |
| R-008053259-001A | 4352 | 79 | CUAAAGUAAAAUAUCUAAC | GUUAGAuAuuuuAcuuuAGUU | 478 |
| R-008242935-000V | 1178 | 80 | AUGAGAGAGCACGAGCUAA | B AuGAGAGAGcAcGAGcuAATT B | 479 |
| R-008242935-000V | 1178 | 80 | AUGAGAGAGCACGAGCUAA | UUAGcucGuGcucucucAuUU | 480 |
| R-008293587-000A | 4390 | 21 | GUUGAACUCAAUAAACCUU | B GUUGAACUCAAUAAACCUUUsU B | 296 |
| R-008293587-000A | 4390 | 21 | GUUGAACUCAAUAAACCUU | AAGGUUUAUUGAGUUCAACUsU | 481 |
| R-008293575-000R | 4390 | 21 | GUUGAACUCAAUAAACCUU | B GuuGAAcucAAuAAAcCUUUsU B | 292 |
| R-008293575-000R | 4390 | 21 | GUUGAACUCAAUAAACCUU | AAGGUUUAUUGAGUUCAACUsU | 481 |
| R-008293566-000G | 1267 | 16 | GACGUCUUCUAGAGCCUUU | B GAcGucuucuAGAGccUUUUsU B | 291 |
| R-008293566-000G | 1267 | 16 | GACGUCUUCUAGAGCCUUU | AAAGGcucuAGAAGAcGucUU | 455 |
| R-008053220-001V | 4703 | 81 | AGUGCCCUGUGUAGAAUUU | B AGuGcccuGuGuAGAAuuuTT B | 482 |
| R-008053220-001V | 4703 | 81 | AGUGCCCUGUGUAGAAUUU | AAAuucuAcAcAGGGcAcuUU | 483 |
| R-008242971-000E | 910 | 82 | GGCAAUGGAACGGGUUAUG | B GGcAAuGGAAcGGGuuAuGTT B | 484 |
| R-008242971-000E | 910 | 82 | GGCAAUGGAACGGGUUAUG | CAUAAcccGuuccAuuGccUU | 485 |
| R-008242959-000P | 972 | 83 | AUGUAUAUAUUAUCUUAAU | B AuGuAuAuAuuAucuuAAuTT B | 486 |
| R-008242959-000P | 972 | 83 | AUGUAUAUAUUAUCUUAAU | AUUAAGAuAAuAuAuAcAuUU | 487 |
| R-008242902-000S | 584 | 84 | AGUACAUCGUGCCGUGCAU | B AGuAcAucGuGccGuGcAuTT B | 488 |
| R-008242902-000S | 584 | 84 | AGUACAUCGUGCCGUGCAU | AU GcAcGGcAcGAuGuAcuUU | 489 |
| R-008291285-000P | 1267 | 16 | GACGUCUUCUAGAGCCUUU | B GACGUCUUCUAGAGCCUUUGsA B | 490 |
| R-008291285-000P | 1267 | 16 | GACGUCUUCUAGAGCCUUU | UCAAAGGCUCUAGAAGACGUCUU | 491 |
| R-008053250-001X | 4872 | 85 | CAAAAUAACAUCAAUCUAU | B cAAAAuAAcAucAAucuAuTT B | 492 |
| R-008053250-001X | 4872 | 85 | CAAAAUAACAUCAAUCUAU | AUAGAuuGAuGuuAuuuuGUU | 493 |
| R-008053245-001Y | 3998 | 86 | GCCACUGUAACGGGAAGCU | B GccAcuGuAAcGGGAAGcuTT B | 494 |
| R-008053245-001Y | 3998 | 86 | GCCACUGUAACGGGAAGCU | AGCuucccGuuAcAGuGGcUU | 495 |
| R-008053235-001F | 4999 | 87 | GCACUUUAAUUACAACUGA | B GcAcuuuAAuuAcAAcuGATT B | 496 |
| R-008053235-001F | 4999 | 87 | GCACUUUAAUUACAACUGA | UCAGuuGuAAuuAAAGuGcUU | 497 |
| R-008293569-000H | 1056 | 26 | UGCUGACAUUGAACCCAAA | B UGCUGACAUUGAACCCAAAUsU B | 319 |
| R-008293569-000H | 1056 | 26 | UGCUGACAUUGAACCCAAA | UUUGGGuucAAuGucAGcAUU | 369 |
| R-008053209-001N | 3725 | 88 | CGCUGAAGCUGGCGCUCGA | B cGcuGAAGcuGGcGcucGATT B | 498 |
| R-008053209-001N | 3725 | 88 | CGCUGAAGCUGGCGCUCGA | UCGAGcGccAGcuucAGcGUU | 499 |
| R-008350747-000N | 971 | 10 | CAUGUAUAUAUUAUCUUAA | B CAUGUAUAUAUUAUCUUAAUsU B | 200 |
| R-008350747-000N | 971 | 10 | CAUGUAUAUAUUAUCUUAA | UUAagaUaaUaUaUaCaUgUsU | 463 |
| R-008350739-000N | 962 | 1 | GAUGUGUGACAUGUAUAUA | B GAUGUGUGACAUGUAUAUAUsU B | 174 |
| R-008350739-000N | 962 | 1 | GAUGUGUGACAUGUAUAUA | UAUAUACAUGUCACACAUCUsU | 466 |
| R-008039849-001F | 4302 | 89 | AAGGUACGCAAUAACUGUU | B AAGGuAcGcAAuAAcuGuuTT B | 500 |
| R-008039849-001F | 4302 | 89 | AAGGUACGCAAUAACUGUU | AACAGuuAuuGcGuAccuuUU | 501 |
| R-008242845-000C | 1230 | 90 | GGUUGAACUCAAUAAACCU | B GGuuGAAcucAAuAAAccuTT B | 502 |
| R-008242845-000C | 1230 | 90 | GGUUGAACUCAAUAAACCU | AGGuuuAuuGAGuucAAccUU | 503 |
| R-008358042-000H | 938 | 11 | UUGAUAAUCCAAAUGGAGA | B UUGAUAAUCCAAAUGGAGAUsU B | 229 |
| R-008358042-000H | 938 | 11 | UUGAUAAUCCAAAUGGAGA | UCUCCaUUUggaUUaUCaaUsU | 504 |
| R-008053265-001H | 3748 | 91 | AUCGUGCCGUGCAUGAACA | B AucGuGccGuGcAuGAAcATT B | 505 |
| R-008053265-001H | 3748 | 91 | AUCGUGCCGUGCAUGAACA | UGUucAuGcAcGGcAcGAuUU | 506 |
| R-008053207-001W | 4527 | 92 | UAGACAACCAGUUCGCAUU | B uAGAcAAccAGuucGcAuuTT B | 507 |
| R-008053207-001W | 4527 | 92 | UAGACAACCAGUUCGCAUU | AAUGcGAAcuGGuuGucuAUU | 508 |
| R-008053219-001F | 4174 | 93 | GGAGGUAUACUUCGAAUUU | B GGAGGuAuAcuucGAAuuuTT B | 509 |
| R-008053219-001F | 4174 | 93 | GGAGGUAUACUUCGAAUUU | AAAuucGAAGuAuAccuccUU | 510 |
| R-008053269-001T | 3751 | 94 | GUGCCGUGCAUGAACAAGC | B GuGccGuGcAuGAAcAAGcTT B | 511 |
| R-008053269-001T | 3751 | 94 | GUGCCGUGCAUGAACAAGC | GCUuGuucAuGcAcGGcAcUU | 512 |
| R-008242767-000V | 780 | 95 | CAAGGAGCCCGGCUGCGAA | B cAAGGAGcccGGcuGcGAATT B | 513 |
| R-008242767-000V | 780 | 95 | CAAGGAGCCCGGCUGCGAA | UUCGcAGccGGGcuccuuGUU | 514 |
| R-008292803-000L | 1267 | 16 | GACGUCUUCUAGAGCCUUU | B GACGUCUUCUAGAGCCUUUUsU B | 282 |
| R-008292803-000L | 1267 | 16 | GACGUCUUCUAGAGCCUUU | AAAGGCUCUAGAAGACGUCUsU | 447 |
| R-008358041-000Z | 938 | 11 | UUGAUAAUCCAAAUGGAGA | B UUGAUAAUCCAAAUGGAGAUsU B | 209 |
| R-008358041-000Z | 938 | 11 | UUGAUAAUCCAAAUGGAGA | UCUCCaUUUggaUUaUCaaUsU | 504 |
| R-008358069-000D | 965 | 4 | GUGUGACAUGUAUAUAUUA | B GuGuGAcAuGuAuAuAuuAUsU B | 180 |
| R-008358069-000D | 965 | 4 | GUGUGACAUGUAUAUAUUA | UAAUAUAUACAUGUCACACUsU | 417 |
| R-008350652-000C | 936 | 5 | UGUUGAUAAUCCAAAUGGA | B UGUUGAUAAUCCAAAUGGAUsU B | 238 |
| R-008350652-000C | 936 | 5 | UGUUGAUAAUCCAAAUGGA | UCCaUUUggaUUaUCaaCaUsU | 515 |
| R-008242890-000W | 779 | 96 | GCAAGGAGCCCGGCUGCGA | B GcAAGGAGcccGGcuGcGATT B | 516 |
| R-008242890-000W | 779 | 96 | GCAAGGAGCCCGGCUGCGA | UCGcAGccGGGcuccuuGcUU | 517 |
| R-008358082-000C | 965 | 4 | GUGUGACAUGUAUAUAUUA | B GuGuGAcAuGuAuAuAuuAUsU B | 180 |
| R-008358082-000C | 965 | 4 | GUGUGACAUGUAUAUAUUA | UAAUaUaUaCaUgUCaCaCUsU | 518 |
| R-008350318-000F | 971 | 10 | CAUGUAUAUAUUAUCUUAA | B CAUGUAUAUAUUAUCUUAAUsU B | 227 |
| R-008350318-000F | 971 | 10 | CAUGUAUAUAUUAUCUUAA | UUAagaUaaUaUaUaCaUgUsU | 463 |
| R-008350752-000M | 962 | 1 | GAUGUGUGACAUGUAUAUA | UAUaUaCaUgUCaCaCaUCUsU | 270 |
| R-008350752-000M | 962 | 1 | GAUGUGUGACAUGUAUAUA | B GAuGuGuGAcAuGuAuAuAUsU B | 399 |
| R-008242905-000T | 907 | 97 | CCGGGCAAUGGAACGGGUU | B ccGGGcAAuGGAAcGGGuuTT B | 519 |
| R-008242905-000T | 907 | 97 | CCGGGCAAUGGAACGGGUU | AACccGuuccAuuGcccGGUU | 520 |
| R-008242776-000D | 1128 | 98 | ACCAGCAUAUGCUACAAGG | B AccAGcAuAuGcuAcAAGGTT B | 521 |
| R-008242776-000D | 1128 | 98 | ACCAGCAUAUGCUACAAGG | CCUuGuAGcAuAuGcuGGuUU | 522 |
| R-008053240-001E | 4933 | 99 | CCUCUUAAUAAUGAUUGUU | B ccucuuAAuAAuGAuuGuuTT B | 523 |
| R-008053240-001E | 4933 | 99 | CCUCUUAAUAAUGAUUGUU | AACAAucAuuAuuAAGAGGUU | 524 |
| R-008358000-000W | 938 | 11 | UUGAUAAUCCAAAUGGAGA | B uuGAuAAuccAAAuGGAGAUsU B | 308 |
| R-008358000-000W | 938 | 11 | UUGAUAAUCCAAAUGGAGA | UCUCCaUUUggaUUaUCaaUsU | 504 |
| R-008053211-001L | 4606 | 100 | GACUUUGUACUGCAUGAUC | B GAcuuuGuAcuGcAuGAucTT B | 525 |
| R-008053211-001L | 4606 | 100 | GACUUUGUACUGCAUGAUC | GAUcAuGcAGuAcAAAGucUU | 526 |
| R-008350310-000L | 936 | 5 | UGUUGAUAAUCCAAAUGGA | B UGUUGAUAAUCCAAAUGGAUsU B | 233 |
| R-008350310-000L | 936 | 5 | UGUUGAUAAUCCAAAUGGA | UCCaUUUggaUUaUCaaCaUsU | 515 |
| R-008053263-001R | 4301 | 101 | CAAGGUACGCAAUAACUGU | B cAAGGuAcGcAAuAAcuGuTT B | 527 |
| R-008053263-001R | 4301 | 101 | CAAGGUACGCAAUAACUGU | ACAGuuAuuGcGuAccuuGUU | 528 |
| R-008350754-000E | 962 | 1 | GAUGUGUGACAUGUAUAUA | B GAUGUGUGACAUGUAUAUAUsU B | 174 |
| R-008350754-000E | 962 | 1 | GAUGUGUGACAUGUAUAUA | UAUaUaCaUgUCaCaCaUCUsU | 385 |
| R-008053256-001Z | 3943 | 102 | GAGCCCGGCUGCGAAACCA | B GAGcccGGcaGcGAAAccATT B | 529 |
| R-008053256-001Z | 3943 | 102 | GAGCCCGGCUGCGAAACCA | UGGuuucGcAGccGGGcucUU | 530 |
| R-008350673-000W | 971 | 10 | CAUGUAUAUAUUAUCUUAA | B CAUGUAUAUAUUAUCUUAAUsU B | 200 |
| R-008350673-000W | 971 | 10 | CAUGUAUAUAUUAUCUUAA | UUAagaUaaUaUaUaCaUgUsU | 531 |
| R-008242875-000E | 1228 | 103 | AGGGUUGAACUCAAUAAAC | B AGGGaaGAAcucAAuAAAcTT B | 532 |
| R-008242875-000E | 1228 | 103 | AGGGUUGAACUCAAUAAAC | GUUuAuuGAGuucAAcccuUU | 533 |
| R-008350795-000H | 971 | 10 | CAUGUAUAUAUUAUCUUAA | B CAUGUAUAUAUUAUCUUAAUsU B | 227 |
| R-008350795-000H | 971 | 10 | CAUGUAUAUAUUAUCUUAA | UUAagaUaaUaUaUaCaUgUsU | 531 |
| R-008350803-000U | 962 | 1 | GAUGUGUGACAUGUAUAUA | uAuAuAcAuGucAcAcAucUsU | 205 |
| R-008350803-000U | 962 | 1 | GAUGUGUGACAUGUAUAUA | B GAuGuGuGAcAuGuAuAuAUsU B | 399 |
| R-008053200-001K | 4282 | 104 | GUACAACCAGCAUAUGCUA | B GuAcAAccAGcAuAuGcuATT B | 534 |
| R-008053200-001K | 4282 | 104 | GUACAACCAGCAUAUGCUA | UAGcAuAuGcuGGuuGuAcUU | 535 |
| R-008053214-001M | 4039 | 105 | CGGACGAAAGCCAUGGUUG | B cGGAcGAAAGccAuGGuuGTT B | 536 |
| R-008053214-001M | 4039 | 105 | CGGACGAAAGCCAUGGUUG | CAAccAuGGcuuucGuccGUU | 537 |
| R-008053224-001E | 918 | 106 | GACUCUACUUGUAUUUAAA | B GAcucuAcuuGuAuuuAAATT B | 538 |
| R-008053224-001E | 918 | 106 | GACUCUACUUGUAUUUAAA | UUUAAAuAcAAGuAGAGucUU | 539 |
| R-008242869-000X | 629 | 107 | ACGACUUCCUCGGCAAGGA | B AcGAcuuccucGGcAAGGATT B | 540 |
| R-008242869-000X | 629 | 107 | ACGACUUCCUCGGCAAGGA | UCCuuGccGAGGAAGucGuUU | 541 |
| R-008053230-001M | 4952 | 108 | GCCAGUGACUGAUGAUUAA | B GccAGuGAcuGAuGAuuAATT B | 542 |
| R-008053230-001M | 4952 | 108 | GCCAGUGACUGAUGAUUAA | UUAAucAucAGucAcuGGcUU | 543 |
| R-008053227-001F | 4162 | 109 | GCCAAGGUAAGUGGAGGUA | B GccAAGGuAAGuGGAGGuATT B | 544 |
| R-008053227-001F | 4162 | 109 | GCCAAGGUAAGUGGAGGUA | UACcuccAcuuAccuuGGcUU | 545 |
| R-008053267-001A | 4381 | 110 | GGUGUGAGGGUUGAACUCA | B GGuGuGAGGGuuGAAcucATT B | 546 |
| R-008053267-001A | 4381 | 110 | GGUGUGAGGGUUGAACUCA | UGAGuucAAcccucAcAccUU | 547 |
| R-008350780-000X | 971 | 10 | CAUGUAUAUAUUAUCUUAA | B cAuGuAuAuAuuAucuuAAUsU B | 235 |
| R-008350780-000X | 971 | 10 | CAUGUAUAUAUUAUCUUAA | UUAagaUaaUaUaUaCaUgUsU | 531 |
| R-008358035-000S | 958 | 9 | GGAAGAUGUGUGACAUGUA | B GGAAGAUGUGUGACAUGUAUsU B | 195 |
| R-008358035-000S | 958 | 9 | GGAAGAUGUGUGACAUGUA | UACaUgUCaCaCaUCUUCCUsU | 548 |
| R-008350757-000F | 955 | 7 | GAUGGAAGAUGUGUGACAU | AuGucAcAcAucuuccAucUsU | 264 |
| R-008350757-000F | 955 | 7 | GAUGGAAGAUGUGUGACAU | B GAuGGAAGAuGuGuGAcAuUsU B | 267 |
| R-008242968-000Y | 1184 | 111 | GAGCACGAGCUAAAGUAAA | B GAGcAcGAGcuAAAGuAAATT B | 549 |
| R-008242968-000Y | 1184 | 111 | GAGCACGAGCUAAAGUAAA | UUUAcuuuAGcucGuGcucUU | 550 |
| R-008053268-001J | 4232 | 112 | AAUUUGAUAGACUGCUGUU | B AAuuuGAuAGAcuGcuGuuTT B | 551 |
| R-008053268-001J | 4232 | 112 | AAUUUGAUAGACUGCUGUU | AACAGcAGucuAucAAAuuUU | 552 |
| R-008242755-000K | 889 | 113 | GCCAUGGUUGCUUGUUAUC | B GccAuGGuuGcuuGuuAucTT B | 553 |
| R-008242755-000K | 889 | 113 | GCCAUGGUUGCUUGUUAUC | GAUAAcAAGcAAccAuGGcUU | 554 |
| R-008053212-001V | 4263 | 114 | CCGUCGCAACCCUCAUGAA | B ccGucGcAAcccucAuGAATT B | 555 |
| R-008053212-001V | 4263 | 114 | CCGUCGCAACCCUCAUGAA | UUCAuGAGGGuuGcGAcGGUU | 556 |
| R-008350671-000D | 955 | 7 | GAUGGAAGAUGUGUGACAU | B GAUGGAAGAUGUGUGACAUUsU B | 192 |
| R-008350671-000D | 955 | 7 | GAUGGAAGAUGUGUGACAU | AUGUCaCaCaUCUUCCaUCUsU | 379 |
| R-008053202-001C | 4289 | 115 | CAGCAUAUGCUACAAGGUA | B cAGcAuAuGcuAcAAGGuATT B | 557 |
| R-008053202-001C | 4289 | 115 | CAGCAUAUGCUACAAGGUA | UACcuuGuAGcAuAuGcuGUU | 558 |
| R-008350290-000R | 936 | 5 | UGUUGAUAAUCCAAAUGGA | B uGuuGAuAAuccAAAuGGAUsU B | 289 |
| R-008350290-000R | 936 | 5 | UGUUGAUAAUCCAAAUGGA | UCCaUUUggaUUaUCaaCaUsU | 515 |
| R-008053277-001T | 4380 | 116 | AGGUGUGAGGGUUGAACUC | B AGGuGuGAGGGuuGAAcucTT B | 559 |
| R-008053277-001T | 4380 | 116 | AGGUGUGAGGGUUGAACUC | GAGuucAAcccucAcAccuUU | 560 |
| R-008350313-000M | 971 | 10 | CAUGUAUAUAUUAUCUUAA | B CAUGUAUAUAUUAUCUUAAUsU B | 227 |
| R-008350313-000M | 971 | 10 | CAUGUAUAUAUUAUCUUAA | UUAAGAUAAUAUAUACAUGUsU | 561 |
| R-008358049-000U | 965 | 4 | GUGUGACAUGUAUAUAUUA | B GUGUGACAUGUAUAUAUUAUsU B | 225 |
| R-008358049-000U | 965 | 4 | GUGUGACAUGUAUAUAUUA | UAAUaUaUaCaUgUCaCaCUsU | 518 |
| R-008291300-000S | 1056 | 26 | UGCUGACAUUGAACCCAAA | B UGCUGACAUUGAACCCAAAUsU B | 319 |
| R-008291300-000S | 1056 | 26 | UGCUGACAUUGAACCCAAA | AAUUUGGGUUCAAUGUCAGCAAsA | 562 |
| R-008358065-000U | 958 | 9 | GGAAGAUGUGUGACAUGUA | B GGAAGAUGUGUGACAUGUAUsU B | 195 |
| R-008358065-000U | 958 | 9 | GGAAGAUGUGUGACAUGUA | UACAUGUCACACAUCUUCCUsU | 563 |
| R-008350756-000X | 955 | 7 | GAUGGAAGAUGUGUGACAU | B GAuGGAAGAuGuGuGAcAuUsU B | 267 |
| R-008350756-000X | 955 | 7 | GAUGGAAGAUGUGUGACAU | AUGUCaCaCaUCUUCCaUCUsU | 379 |
| R-008053243-001F | 4349 | 117 | GAGCUAAAGUAAAAUAUCU | B GAGcuAAAGuAAAAuAucuTT B | 564 |
| R-008053243-001F | 4349 | 117 | GAGCUAAAGUAAAAUAUCU | AGAuAuuuuAcuuuAGcucUU | 565 |
| R-008242872-000D | 849 | 118 | CGGGAAGCUGGGCAGCUAC | B cGGGAAGcuGGGcAGcuAcTT B | 566 |
| R-008242872-000D | 849 | 118 | CGGGAAGCUGGGCAGCUAC | GUAGcuGcccAGcuucccGUU | 567 |
| R-008358040-000R | 965 | 4 | GUGUGACAUGUAUAUAUUA | B GUGUGACAUGUAUAUAUUAUsU B | 265 |
| R-008358040-000R | 965 | 4 | GUGUGACAUGUAUAUAUUA | UAAUaUaUaCaUgUCaCaCUsU | 518 |
| R-008350785-000R | 964 | 8 | UGUGUGACAUGUAUAUAUU | AAUAUAUACAUGUCACACAUsU | 251 |
| R-008350785-000R | 964 | 8 | UGUGUGACAUGUAUAUAUU | B uGuGuGAcAuGuAuAuAuuUsU B | 303 |
| R-008242833-000T | 894 | 119 | GGUUGCUUGUUAUCCGGGC | B GGuuGcuuGuuAuccGGGcTT B | 568 |
| R-008242833-000T | 894 | 119 | GGUUGCUUGUUAUCCGGGC | GCCcGGAuAAcAAGcAAccUU | 569 |
| R-008053213-001D | 4825 | 120 | UACAAUUUAUCUAAACUGA | B uAcAAuuuAucuAAAcuGATT B | 570 |
| R-008053213-001D | 4825 | 120 | UACAAUUUAUCUAAACUGA | UCAGuuuAGAuAAAuuGuAUU | 571 |
| R-008291298-000H | 1106 | 18 | GUCGCAACCCUCAUGAAGU | B GUCGCAACCCUCAUGAAGUGsA B | 572 |
| R-008291298-000H | 1106 | 18 | GUCGCAACCCUCAUGAAGU | GUACUUCAUGAGGGUUGCGACGG | 573 |
| R-008242764-000U | 631 | 121 | GACUUCCUCGGCAAGGAGA | B GAcuuccucGGcAAGGAGATT B | 574 |
| R-008242764-000U | 631 | 121 | GACUUCCUCGGCAAGGAGA | UCUccuuGccGAGGAAGucUU | 575 |
| R-008293565-000Y | 4390 | 21 | GUUGAACUCAAUAAACCUU | B GuuGAAcucAAuAAAcCUUUsU B | 292 |
| R-008293565-000Y | 4390 | 21 | GUUGAACUCAAUAAACCUU | aagGUUUAUUGAGUUCAACUsU | 295 |
| R-008292761-000N | 4390 | 21 | GUUGAACUCAAUAAACCUU | B GUUGAACUCAAUAAACCUUUsU B | 296 |
| R-008292761-000N | 4390 | 21 | GUUGAACUCAAUAAACCUU | AsAGGUUUAUUGAGUUCAACUsU | 331 |
| R-008350781-000F | 971 | 10 | CAUGUAUAUAUUAUCUUAA | B CAUGUAUAUAUUAUCUUAAUsU B | 200 |
| R-008350781-000F | 971 | 10 | CAUGUAUAUAUUAUCUUAA | UUAAGAUAAUAUAUACAUGUsU | 561 |
| R-008242770-000B | 800 | 122 | CCAUUGGGCUGCUCAUGAG | B ccAuuGGGcuGcucAuGAGTT B | 576 |
| R-008242770-000B | 800 | 122 | CCAUUGGGCUGCUCAUGAG | CUCAuGAGcAGcccAAuGGUU | 577 |
| R-008053244-001P | 4997 | 123 | GAGCACUUUAAUUACAACU | B GAGcAcuuuAAuuAcAAcuTT B | 578 |
| R-008053244-001P | 4997 | 123 | GAGCACUUUAAUUACAACU | AGUuGuAAuuAAAGuGcucUU | 579 |
| R-008242788-000N | 781 | 124 | AAGGAGCCCGGCUGCGAAA | B AAGGAGcccGGcaGcGAAATT B | 580 |
| R-008242788-000N | 781 | 124 | AAGGAGCCCGGCUGCGAAA | UUUcGcAGccGGGcuccuuUU | 581 |
| R-008291290-000N | 4390 | 21 | GUUGAACUCAAUAAACCUU | B GUUGAACUCAAUAAACCUUUsU B | 296 |
| R-008291290-000N | 4390 | 21 | GUUGAACUCAAUAAACCUU | AAGGUUUAUUGAGUUCAACUsU | 582 |
| R-008242806-000S | 970 | 125 | ACAUGUAUAUAUUAUCUUA | B AcAuGuAuAuAuuAucuuATT B | 583 |
| R-008242806-000S | 970 | 125 | ACAUGUAUAUAUUAUCUUA | UAAGAuAAuAuAuAcAuGuUU | 584 |
| R-008350802-000K | 962 | 1 | GAUGUGUGACAUGUAUAUA | UAUaUaCaUgUCaCaCaUCUsU | 385 |
| R-008350802-000K | 962 | 1 | GAUGUGUGACAUGUAUAUA | B GAuGuGuGAcAuGuAuAuAUsU B | 399 |
| R-008292769-000H | 4390 | 21 | GUUGAACUCAAUAAACCUU | AsAsGGUUUAUUGAGUUCAACUsU | 293 |
| R-008292769-000H | 4390 | 21 | GUUGAACUCAAUAAACCUU | B GUUGAACUCAAUAAACCUUUsU B | 296 |
| R-008292825-000N | 4390 | 21 | GUUGAACUCAAUAAACCUU | B GUUGAACUCAAUAAACCUUUsU B | 296 |
| R-008292825-000N | 4390 | 21 | GUUGAACUCAAUAAACCUU | AAsGGUUUAUUGAGUUCAACUsU | 585 |
| R-008292811-000L | 4390 | 21 | GUUGAACUCAAUAAACCUU | B GUUGAACUCAAUAAACCUUUsU B | 296 |
| R-008292811-000L | 4390 | 21 | GUUGAACUCAAUAAACCUU | AAsGsGUUUAUUGAGUUCAACUsU | 586 |
| R-008292819-000F | 4390 | 21 | GUUGAACUCAAUAAACCUU | B GUUGAACUCAAUAAACCUUUsU B | 296 |
| R-008292819-000F | 4390 | 21 | GUUGAACUCAAUAAACCUU | AsAsGsGUUUAUUGAGUUCAACUsU | 357 |
| R-008358033-000Z | 958 | 9 | GGAAGAUGUGUGACAUGUA | B GGAAGAUGUGUGACAUGUAUsU B | 214 |
| R-008358033-000Z | 958 | 9 | GGAAGAUGUGUGACAUGUA | UACaUgUCaCaCaUCUUCCUsU | 548 |
| R-008291309-000V | 4390 | 21 | GUUGAACUCAAUAAACCUU | B GUUGAACUCAAUAAACCUUUsU B | 296 |
| R-008291309-000V | 4390 | 21 | GUUGAACUCAAUAAACCUU | AsAsGsGUUUAUUGAGUUCAACUsU | 587 |
| R-008053221-001D | 4168 | 126 | GUAAGUGGAGGUAUACUUC | B GuAAGuGGAGGuAuAcuucTT B | 588 |
| R-008053221-001D | 4168 | 126 | GUAAGUGGAGGUAUACUUC | GAAGuAuAccuccAcuuAcUU | 589 |
| R-008350738-000E | 964 | 8 | UGUGUGACAUGUAUAUAUU | B uGuGuGAcAuGuAuAuAuuUsU B | 303 |
| R-008350738-000E | 964 | 8 | UGUGUGACAUGUAUAUAUU | AAUaUaUaCaUgUCaCaCaUsU | 433 |
| R-008292791-000R | 1106 | 18 | GUCGCAACCCUCAUGAAGU | B GUCGCAACCCUCAUGAAGUUsU B | 274 |
| R-008292791-000R | 1106 | 18 | GUCGCAACCCUCAUGAAGU | ACUUCAUGAGGGUUGCGACUsU | 420 |
| R-008292815-000W | 4390 | 21 | GUUGAACUCAAUAAACCUU | B GUUGAACUCAAUAAACCUUUsU B | 296 |
| R-008292815-000W | 4390 | 21 | GUUGAACUCAAUAAACCUU | AsAGsGUUUAUUGAGUUCAACUsU | 590 |
| R-008242854-000L | 848 | 127 | ACGGGAAGCUGGGCAGCUA | B AcGGGAAGcaGGGcAGcuATT B | 591 |
| R-008242854-000L | 848 | 127 | ACGGGAAGCUGGGCAGCUA | UAGcuGcccAGcuucccGuUU | 592 |
| R-008053272-001Z | 3832 | 128 | GUGCGCGCCCUGCACGACA | B GuGcGcGcccuGcAcGAcATT B | 593 |
| R-008053272-001Z | 3832 | 128 | GUGCGCGCCCUGCACGACA | UGUcGuGcAGGGcGcGcAcUU | 594 |
| R-008242977-000G | 535 | 129 | CGGCCCAACGGGCAGACGA | B cGGcccAAcGGGcAGAcGATT B | 595 |
| R-008242977-000G | 535 | 129 | CGGCCCAACGGGCAGACGA | UCGucuGcccGuuGGGccGUU | 596 |
| R-008358058-000C | 958 | 9 | GGAAGAUGUGUGACAUGUA | B GGAAGAuGuGuGAcAuGuAUsU B | 260 |
| R-008358058-000C | 958 | 9 | GGAAGAUGUGUGACAUGUA | UACAUGUCACACAUCUUCCUsU | 563 |
| R-008242812-000Z | 1105 | 130 | CGUCGCAACCCUCAUGAAG | B cGucGcAAcccucAuGAAGTT B | 597 |
| R-008242812-000Z | 1105 | 130 | CGUCGCAACCCUCAUGAAG | CUUcAuGAGGGuuGcGAcGUU | 598 |
| R-008053247-001R | 1181 | 131 | GUCUCUGAGUGUAGUAUGA | B GucucuGAGuGuAGuAuGATT B | 599 |
| R-008053247-001R | 1181 | 131 | GUCUCUGAGUGUAGUAUGA | UCAuAcuAcAcucAGAGAcUU | 600 |
| R-008358009-000Z | 958 | 9 | GGAAGAUGUGUGACAUGUA | B GGAAGAUGUGUGACAUGUAUsU B | 214 |
| R-008358009-000Z | 958 | 9 | GGAAGAUGUGUGACAUGUA | UACAUGUCACACAUCUUCCUsU | 563 |
| R-008053201-001U | 4164 | 132 | CAAGGUAAGUGGAGGUAUA | B cAAGGuAAGuGGAGGuAuATT B | 601 |
| R-008053201-001U | 4164 | 132 | CAAGGUAAGUGGAGGUAUA | UAUAccuccAcuuAccuuGUU | 602 |
| R-008242818-000B | 1271 | 133 | UCUUCUAGAGCCUUUGAUC | B ucuucuAGAGccuuuGAucTT B | 603 |
| R-008242818-000B | 1271 | 133 | UCUUCUAGAGCCUUUGAUC | GAUcAAAGGcucuAGAAGAUU | 604 |
| R-008350800-000T | 962 | 1 | GAUGUGUGACAUGUAUAUA | B GAuGuGuGAcAuGuAuAuAUsU B | 399 |
| R-008350800-000T | 962 | 1 | GAUGUGUGACAUGUAUAUA | UAUAUACAUGUCACACAUCUsU | 466 |
| R-008242926-000L | 678 | 134 | CGCCCUGCACGACACCGGG | B cGcccuGcAcGAcAccGGGTT B | 605 |
| R-008242926-000L | 678 | 134 | CGCCCUGCACGACACCGGG | CCCGGuGucGuGcAGGGcGUU | 606 |
| R-008053264-001Z | 3755 | 135 | CGUGCAUGAACAAGCACGG | B cGuGcAuGAAcAAGcAcGGTT B | 607 |
| R-008053264-001Z | 3755 | 135 | CGUGCAUGAACAAGCACGG | CCGuGcuuGuucAuGcAcGUU | 608 |
| R-008358059-000L | 958 | 9 | GGAAGAUGUGUGACAUGUA | B GGAAGAuGuGuGAcAuGuAUsU B | 260 |
| R-008358059-000L | 958 | 9 | GGAAGAUGUGUGACAUGUA | UACaUgUCaCaCaUCUUCCUsU | 548 |
| R-008053223-001W | 1838 | 136 | CAUCCGCGCAGCACAGAUU | B cAuccGcGcAGcAcAGAuuTT B | 609 |
| R-008053223-001W | 1838 | 136 | CAUCCGCGCAGCACAGAUU | AAUcuGuGcuGcGcGGAuGUU | 610 |
| R-008242782-000L | 806 | 137 | GGCUGCUCAUGAGCAGCAU | B GGcuGcucAuGAGcAGcAuTT B | 611 |
| R-008242782-000L | 806 | 137 | GGCUGCUCAUGAGCAGCAU | AUGcuGcucAuGAGcAGccUU | 612 |
| R-008242800-000P | 680 | 138 | CCCUGCACGACACCGGGAA | B cccuGcAcGAcAccGGGAATT B | 613 |
| R-008242800-000P | 680 | 138 | CCCUGCACGACACCGGGAA | UUCccGGuGucGuGcAGGGUU | 614 |
| R-008242791-000V | 710 | 139 | GGCAGCUGGUCAGCCAGAA | B GGcAGcuGGucAGccAGAATT B | 615 |
| R-008242791-000V | 710 | 139 | GGCAGCUGGUCAGCCAGAA | UUCuGGcuGAccAGcuGccUU | 616 |
| R-008242758-000L | 922 | 140 | GGUUAUGUACGUCAUGUUG | B GGuuAuGuAcGucAuGuuGTT B | 617 |
| R-008242758-000L | 922 | 140 | GGUUAUGUACGUCAUGUUG | CAAcAuGAcGuAcAuAAccUU | 618 |
| R-008292775-000R | 4390 | 21 | GUUGAACUCAAUAAACCUU | B GUUGAACUCAAUAAACCUUUsU B | 296 |
| R-008292775-000R | 4390 | 21 | GUUGAACUCAAUAAACCUU | AAGGUUUAUUGAGUUCAACUsU | 474 |
| R-008242749-000C | 536 | 141 | GGCCCAACGGGCAGACGAA | B GGcccAAcGGGcAGAcGAATT B | 619 |
| R-008242749-000C | 536 | 141 | GGCCCAACGGGCAGACGAA | UUCGucuGcccGuuGGGccUU | 620 |
| R-008242896-000Y | 850 | 142 | GGGAAGCUGGGCAGCUACA | B GGGAAGcaGGGcAGcuAcATT B | 621 |
| R-008242896-000Y | 850 | 142 | GGGAAGCUGGGCAGCUACA | UGUAGcuGcccAGcuucccUU | 622 |
| R-008358029-000J | 938 | 11 | UUGAUAAUCCAAAUGGAGA | B UUGAUAAUCCAAAUGGAGAUsU B | 209 |
| R-008358029-000J | 938 | 11 | UUGAUAAUCCAAAUGGAGA | UCUCCAUUUGGAUUAUCAAUsU | 309 |
| R-008242827-000K | 851 | 143 | GGAAGCUGGGCAGCUACAA | B GGAAGcuGGGcAGcuAcAATT B | 623 |
| R-008242827-000K | 851 | 143 | GGAAGCUGGGCAGCUACAA | UUGuAGcuGcccAGcuuccUU | 624 |
| R-008053253-001Y | 912 | 144 | GUAUUAGACUCUACUUGUA | B GuAuuAGAcucuAcuuGuATT B | 625 |
| R-008053253-001Y | 912 | 144 | GUAUUAGACUCUACUUGUA | UACAAGuAGAGucuAAuAcUU | 626 |
| R-008242848-000D | 797 | 145 | AAACCAUUGGGCUGCUCAU | B AAAccAuuGGGcuGcucAuTT B | 627 |
| R-008242848-000D | 797 | 145 | AAACCAUUGGGCUGCUCAU | AUGAGcAGcccAAuGGuuuUU | 628 |
| R-008242932-000U | 805 | 146 | GGGCUGCUCAUGAGCAGCA | B GGGcuGcucAuGAGcAGcATT B | 629 |
| R-008242932-000U | 805 | 146 | GGGCUGCUCAUGAGCAGCA | UGCuGcucAuGAGcAGccUU | 630 |
| R-008053248-001Z | 2104 | 147 | GCGCAAGAGAUUGGAUUAA | B GcGcAAGAGAuuGGAuuAATT B | 631 |
| R-008053248-001Z | 2104 | 147 | GCGCAAGAGAUUGGAUUAA | UUAAuccAAucucuuGcGcUU | 632 |
| R-008053237-001Y | 305 | 148 | UUCCGUUAAAGUUUAAAUA | B uuccGuuAAAGuuuAAAuATT B | 633 |
| R-008053237-001Y | 305 | 148 | UUCCGUUAAAGUUUAAAUA | UAUuuAAAcuuuAAcGGAAUU | 634 |
| R-008350786-000Z | 964 | 8 | UGUGUGACAUGUAUAUAUU | B UGUGUGACAUGUAUAUAUUUsU B | 206 |
| R-008350786-000Z | 964 | 8 | UGUGUGACAUGUAUAUAUU | AAUAUAUACAUGUCACACAUsU | 251 |
| R-008053232-001E | 2158 | 149 | CAGGGCUUCUUGAAAUAGA | B cAGGGcuucuuGAAAuAGATT B | 635 |
| R-008053232-001E | 2158 | 149 | CAGGGCUUCUUGAAAUAGA | UCUAuuucAAGAAGcccuGUU | 636 |
| R-008053261-001Y | 3749 | 150 | UCGUGCCGUGCAUGAACAA | B ucGuGccGuGcAuGAAcAATT B | 637 |
| R-008053261-001Y | 3749 | 150 | UCGUGCCGUGCAUGAACAA | UUGuucAuGcAcGGcAcGAUU | 638 |
| R-008242824-000J | 671 | 151 | AGGUGCGCGCCCUGCACGA | B AGGuGcGcGcccuGcAcGATT B | 639 |
| R-008242824-000J | 671 | 151 | AGGUGCGCGCCCUGCACGA | UCGuGcAGGGcGcGcAccuUU | 640 |
| R-008242737-000T | 796 | 152 | GAAACCAUUGGGCUGCUCA | B GAAAccAuuGGGcuGcucATT B | 641 |
| R-008242737-000T | 796 | 152 | GAAACCAUUGGGCUGCUCA | UGAGcAGcccAAuGGuuucUU | 642 |
| R-008053273-001H | 3692 | 153 | UGCGGCCCAACGGGCAGAC | B uGcGGcccAAcGGGcAGAcTT B | 643 |
| R-008053273-001H | 3692 | 153 | UGCGGCCCAACGGGCAGAC | GUCuGcccGuuGGGccGcAUU | 644 |
| R-008350677-000F | 971 | 10 | CAUGUAUAUAUUAUCUUAA | B cAuGuAuAuAuuAucuuAAUsU B | 235 |
| R-008350677-000F | 971 | 10 | CAUGUAUAUAUUAUCUUAA | UUAAGAUAAUAUAUACAUGUsU | 561 |
| R-008053210-001C | 4384 | 154 | GUGAGGGUUGAACUCAAUA | B GuGAGGGuuGAAcucAAuATT B | 645 |
| R-008053210-001C | 4384 | 154 | GUGAGGGUUGAACUCAAUA | UAUuGAGuucAAcccucAcUU | 646 |
| R-008053241-001N | 3752 | 155 | UGCCGUGCAUGAACAAGCA | B uGccGuGcAuGAAcAAGcATT B | 647 |
| R-008053241-001N | 3752 | 155 | UGCCGUGCAUGAACAAGCA | UGCuuGuucAuGcAcGGcAUU | 648 |
| R-008053234-001X | 2106 | 156 | GCAAGAGAUUGGAUUAACA | B GcAAGAGAuuGGAuuAAcATT B | 649 |
| R-008053234-001X | 2106 | 156 | GCAAGAGAUUGGAUUAACA | UGUuAAuccAAucucuuGcUU | 650 |
| R-008053239-001R | 79 | 157 | CCCACCUAGUGCUCCUAAU | B cccAccuAGuGcuccuAAuTT B | 651 |
| R-008053239-001R | 79 | 157 | CCCACCUAGUGCUCCUAAU | AUUAGGAGcAcuAGGuGGGUU | 652 |
| R-008053266-001S | 3747 | 158 | CAUCGUGCCGUGCAUGAAC | B cAucGuGccGuGcAuGAAcTT B | 653 |
| R-008053266-001S | 3747 | 158 | CAUCGUGCCGUGCAUGAAC | GUUcAuGcAcGGcAcGAuGUU | 654 |
| R-008100897-000H | 3745 | 159 | UACAUCGUGCCGUGCAUGA | B uAcAucGuGccGuGcAuGATT B | 655 |
| R-008100897-000H | 3745 | 159 | UACAUCGUGCCGUGCAUGA | UCAuGcAcGGcAcGAuGuAUU | 656 |
| R-008053271-001R | 3754 | 160 | CCGUGCAUGAACAAGCACG | B ccGuGcAuGAAcAAGcAcGTT B | 657 |
| R-008053271-001R | 3754 | 160 | CCGUGCAUGAACAAGCACG | CGUGcuuGuucAuGcAcGGUU | 658 |
| R-008053228-001P | 395 | 161 | CGACAAUGCUACUGGAGUU | B cGAcAAuGcuAcuGGAGuuTT B | 659 |
| R-008053228-001P | 395 | 161 | CGACAAUGCUACUGGAGUU | AACuccAGuAGcAuuGucGUU | 660 |
| R-008053231-001W | 1843 | 162 | GCGCAGCACAGAUUCUAUU | B GcGcAGcAcAGAuucuAuuTT B | 661 |
| R-008053231-001W | 1843 | 162 | GCGCAGCACAGAUUCUAUU | AAUAGAAucuGuGcuGcGcUU | 662 |
| R-008053229-001Y | 261 | 163 | GCAAGCACCACAUGUGUUU | B GcAAGcAccAcAuGuGuuuTT B | 663 |
| R-008053229-001Y | 261 | 163 | GCAAGCACCACAUGUGUUU | AAAcAcAuGuGGuGcuuGcUU | 664 |
| R-008053252-001P | 1844 | 164 | CGCAGCACAGAUUCUAUUA | B cGcAGcAcAGAuucuAuuATT B | 665 |
| R-008053252-001P | 1844 | 164 | CGCAGCACAGAUUCUAUUA | U AAuAGAAucuGuGcuGcGUU | 666 |
| R-008350666-000E | 936 | 5 | UGUUGAUAAUCCAAAUGGA | B UGUUGAUAAUCCAAAUGGAUsU B | 667 |
| R-008350666-000E | 936 | 5 | UGUUGAUAAUCCAAAUGGA | UCCAUUUGGAUUAUCAACAUsU | 668 |
| R-008242842-000B | 530 | 165 | GCCUGCGGCCCAACGGGCA | B GccuGcGGcccAAcGGGcATT B | 669 |
| R-008242842-000B | 530 | 165 | GCCUGCGGCCCAACGGGCA | UGCccGuuGGGccGcAGGcUU | 670 |
| R-008053236-001P | 121 | 166 | GGACAUUCAUUGCCUCACU | B GGAcAuucAuuGccucAcuTT B | 671 |
| R-008053236-001P | 121 | 166 | GGACAUUCAUUGCCUCACU | AGUGAGGcAAuGAAuGuccUU | 672 |
| R-008053254-001G | 1363 | 167 | GUUCGGUUUGAAAUUUGAA | B GuucGGuuuGAAAuuuGAATT B | 673 |
| R-008053254-001G | 1363 | 167 | GUUCGGUUUGAAAUUUGAA | UUCAAAuuucAAAccGAAcUU | 674 |
| R-008053251-001F | 4262 | 168 | ACCGUCGCAACCCUCAUGA | B AccGucGcAAcccucAuGATT B | 675 |
| R-008053251-001F | 4262 | 168 | ACCGUCGCAACCCUCAUGA | UCAuGAGGGuuGcGAcGGuUU | 676 |
| R-008074446-000X | 4295 | 52 | AUGCUACAAGGUACGCAAU | B AuGcuAcAAGGuAcGcAAuTT B | 405 |
| R-008074446-000X | 4295 | 52 | AUGCUACAAGGUACGCAAU | AUUGcGuAccuuGuAGcAuUU | 677 |
| R-008114774-000E | 285 | 169 | CAAUAACUGUUUGGUAUUU | B cAAuAAcuGuuuGGuAuuuTT B | 678 |
| R-008114774-000E | 285 | 169 | CAAUAACUGUUUGGUAUUU | AAAuAccAAAcAGuuAuuGUU | 679 |
| R-008291273-000E | 994 | 34 | GACUGGGAUGCCAAGGUAA | B GACUGGGAUGCCAAGGUAAGsU B | 680 |
| R-008291273-000E | 994 | 34 | GACUGGGAUGCCAAGGUAA | ACUUACCUUGGCAUCCCAGUCUsU | 681 |
| R-008291282-000N | 994 | 34 | GACUGGGAUGCCAAGGUAA | B GACUGGGAUGCCAAGGUAAUsU B | 682 |
| R-008291282-000N | 994 | 34 | GACUGGGAUGCCAAGGUAA | UsUsAsCCUUGGCAUCCCAGUCUsU | 683 |
| R-008291287-000G | 994 | 34 | GACUGGGAUGCCAAGGUAA | B GACUGGGAUGCCAAGGUAAUsU B | 682 |
| R-008291287-000G | 994 | 34 | GACUGGGAUGCCAAGGUAA | UUACCUUGGCAUCCCAGUCUsU | 684 |
| R-008292759-000R | 994 | 34 | GACUGGGAUGCCAAGGUAA | B GACUGGGAUGCCAAGGUAAUsU B | 682 |
| R-008292759-000R | 994 | 34 | GACUGGGAUGCCAAGGUAA | UUsAsCCUUGGCAUCCCAGUCUsU | 685 |
| R-008292763-000F | 994 | 34 | GACUGGGAUGCCAAGGUAA | B GACUGGGAUGCCAAGGUAAUsU B | 682 |
| R-008292763-000F | 994 | 34 | GACUGGGAUGCCAAGGUAA | UUACCUUGGCAUCCCAGUCUsU | 686 |
| R-008292773-000Y | 994 | 34 | GACUGGGAUGCCAAGGUAA | B GACUGGGAUGCCAAGGUAAUsU B | 682 |
| R-008292773-000Y | 994 | 34 | GACUGGGAUGCCAAGGUAA | UUACCUUGGCAUCCCAGUCUsU | 687 |
| R-008292779-000A | 994 | 34 | GACUGGGAUGCCAAGGUAA | B GACUGGGAUGCCAAGGUAAUsU B | 682 |
| R-008292779-000A | 994 | 34 | GACUGGGAUGCCAAGGUAA | UsUsAsCCUUGGCAUCCCAGUCUsU | 688 |
| R-008292781-000Y | 994 | 34 | GACUGGGAUGCCAAGGUAA | B GACUGGGAUGCCAAGGUAAUsU B | 682 |
| R-008292781-000Y | 994 | 34 | GACUGGGAUGCCAAGGUAA | UsUAsCCUUGGCAUCCCAGUCUsU | 689 |
| R-008292789-000T | 994 | 34 | GACUGGGAUGCCAAGGUAA | B GACUGGGAUGCCAAGGUAAUsU B | 682 |
| R-008292789-000T | 994 | 34 | GACUGGGAUGCCAAGGUAA | UsUACCUUGGCAUCCCAGUCUsU | 690 |
| R-008292799-000K | 994 | 34 | GACUGGGAUGCCAAGGUAA | B GACUGGGAUGCCAAGGUAAUsU B | 682 |
| R-008292799-000K | 994 | 34 | GACUGGGAUGCCAAGGUAA | UsUsACCUUGGCAUCCCAGUCUsU | 691 |
| R-008313812-000E | 4302 | 89 | AAGGUACGCAAUAACUGUU | B AAGGUACGCAAUAACUGUUUsU B | 692 |
| R-008313812-000E | 4302 | 89 | AAGGUACGCAAUAACUGUU | AACAGUUAUUGCGUACCUUUsU | 693 |
| R-008313815-000F | 4302 | 89 | AAGGUACGCAAUAACUGUU | B AAGGUACGCAAUAACUGUUUsU B | 694 |
| R-008313815-000F | 4302 | 89 | AAGGUACGCAAUAACUGUU | AACAGUUAUUGCGUACCUUUsU | 695 |
| R-008313818-000G | 4295 | 52 | AUGCUACAAGGUACGCAAU | B AUGCUACAAGGUACGCAAUUsU B | 696 |
| R-008313818-000G | 4295 | 52 | AUGCUACAAGGUACGCAAU | AUUGCGUACCUUGUAGCAUUsU | 697 |
| R-008313824-000P | 4302 | 89 | AAGGUACGCAAUAACUGUU | B AAGGUACGCAAUAACUGUUUsU B | 698 |
| R-008313824-000P | 4302 | 89 | AAGGUACGCAAUAACUGUU | AACAGuuAuuGcGuAccuuUsU | 699 |
| R-008313829-000H | 4295 | 52 | AUGCUACAAGGUACGCAAU | B AUGCUACAAGGUACGCAAUUsU B | 700 |
| R-008313829-000H | 4295 | 52 | AUGCUACAAGGUACGCAAU | AUUGcGuAccuuGuAGcAuUsU | 701 |
| R-008313839-000A | 4302 | 89 | AAGGUACGCAAUAACUGUU | AACAGuuAuuGcGuAccuuUsU | 699 |
| R-008313839-000A | 4302 | 89 | AAGGUACGCAAUAACUGUU | B AAGGuAcGcAAuAAcuGuuTsT B | 702 |
| R-008313842-000G | 4302 | 89 | AAGGUACGCAAUAACUGUU | B AAGGUACGCAAUAACUGUUTT B | 703 |
| R-008313842-000G | 4302 | 89 | AAGGUACGCAAUAACUGUU | AACAGUUAUUGCGUACCUUUU | 704 |
| R-008313845-000H | 4295 | 52 | AUGCUACAAGGUACGCAAU | B AuGcuAcAAGGuAcGcAAuUsU B | 705 |
| R-008313845-000H | 4295 | 52 | AUGCUACAAGGUACGCAAU | AuuGcGuAccuuGuAGcAuUsU | 706 |
| R-008313848-000J | 4295 | 52 | AUGCUACAAGGUACGCAAU | B AUGCUACAAGGUACGCAAUTT B | 707 |
| R-008313848-000J | 4295 | 52 | AUGCUACAAGGUACGCAAU | AUUGCGUACCUUGUAGCAUUU | 708 |
| R-008313862-000S | 4295 | 52 | AUGCUACAAGGUACGCAAU | B AuGcuAcAAGGuAcGcAAuTT B | 709 |
| R-008313862-000S | 4295 | 52 | AUGCUACAAGGUACGCAAU | AuuGcGuAccuuGuAGcAuUU | 710 |
| R-008313869-000C | 4302 | 89 | AAGGUACGCAAUAACUGUU | B AAGGuAcGcAAuAAcuGuuUsU B | 711 |
| R-008313869-000C | 4302 | 89 | AAGGUACGCAAUAACUGUU | AACAGuuAuuGcGuAccuuUsU | 712 |
| R-008313872-000J | 4302 | 89 | AAGGUACGCAAUAACUGUU | B AAGGuAcGcAAuAAcuGuuTT B | 713 |
| R-008313872-000J | 4302 | 89 | AAGGUACGCAAUAACUGUU | AAcAGuuAuuGcGuAccuuUU | 714 |
| R-008313875-000K | 4295 | 52 | AUGCUACAAGGUACGCAAU | B AUGCUACAAGGUACGCAAUUsU B | 715 |
| R-008313875-000K | 4295 | 52 | AUGCUACAAGGUACGCAAU | AUUGCGUACCUUGUAGCAUUsU | 716 |
| R-008313877-000C | 4295 | 52 | AUGCUACAAGGUACGCAAU | AUUGcGuAccuuGuAGcAuUsU | 701 |
| R-008313877-000C | 4295 | 52 | AUGCUACAAGGUACGCAAU | B AuGcuAcAAGGuAcGcAAuUsU B | 717 |
| R-008313879-000V | 4295 | 52 | AUGCUACAAGGUACGCAAU | AUUGcGuAccuuGuAGcAuUsU | 701 |
| R-008313879-000V | 4295 | 52 | AUGCUACAAGGUACGCAAU | B AuGcuAcAAGGuAcGcAAuTsT B | 718 |
| R-008313883-000K | 4302 | 89 | AAGGUACGCAAUAACUGUU | AACAGuuAuuGcGuAccuuUsU | 699 |
| R-008313883-000K | 4302 | 89 | AAGGUACGCAAUAACUGUU | B AAGGuAcGcAAuAAcuGuuUsU B | 719 |
| R-008321381-000U | 4295 | 52 | AUGCUACAAGGUACGCAAU | B AUGCUACAAGGUACGCAAUUU B | 720 |
| R-008321381-000U | 4295 | 52 | AUGCUACAAGGUACGCAAU | AUUGCGUACCUUGUAGCAUUU | 721 |
| R-008321383-000L | 4295 | 52 | AUGCUACAAGGUACGCAAU | B AUGCUACAAGGUACGCAAUUU B | 720 |
| R-008321383-000L | 4295 | 52 | AUGCUACAAGGUACGCAAU | AUUGCGUACCUUGUAGCAUUU | 722 |
| R-008321386-000M | 4302 | 89 | AAGGUACGCAAUAACUGUU | AACAGuuAuuGcGuAccuuUU | 501 |
| R-008321386-000M | 4302 | 89 | AAGGUACGCAAUAACUGUU | B AAGGGACGCAAGAACGGGGUU B | 723 |
| R-008321388-000E | 4302 | 89 | AAGGUACGCAAUAACUGUU | AACAGuuAuuGcGuAccuuUU | 501 |
| R-008321388-000E | 4302 | 89 | AAGGUACGCAAUAACUGUU | B AAGGuAcGcAAuAAcuGuuUU B | 724 |
| R-008321397-000N | 4295 | 52 | AUGCUACAAGGUACGCAAU | AUUGcGuAccuuGuAGcAuUU | 406 |
| R-008321397-000N | 4295 | 52 | AUGCUACAAGGUACGCAAU | B AGGCGACAAGGGACGCAAGUU B | 725 |
| R-008321398-000X | 4295 | 52 | AUGCUACAAGGUACGCAAU | AUUGcGuAccuuGuAGcAuUU | 406 |
| R-008321398-000X | 4295 | 52 | AUGCUACAAGGUACGCAAU | B AUGCUACAAGGUACGCAAUUU B | 720 |
| R-008321400-000F | 4302 | 89 | AAGGUACGCAAUAACUGUU | B AAGGGACGCAAGAACGGGGUU B | 723 |
| R-008321400-000F | 4302 | 89 | AAGGUACGCAAUAACUGUU | AACagUUaUUgCgUaCCUUUU | 726 |
| R-008321416-000A | 4295 | 52 | AUGCUACAAGGUACGCAAU | AUUGcGuAccuuGuAGcAuUU | 406 |
| R-008321416-000A | 4295 | 52 | AUGCUACAAGGUACGCAAU | B AuGcuAcAAGGuAcGcAAuUU B | 727 |
| R-008321423-000S | 4295 | 52 | AUGCUACAAGGUACGCAAU | B AUGCUACAAGGUACGCAAUUU B | 720 |
| R-008321423-000S | 4295 | 52 | AUGCUACAAGGUACGCAAU | AUUgCgUaCCUUgUagCaUUU | 728 |
| R-008321425-000J | 4302 | 89 | AAGGUACGCAAUAACUGUU | B AAGGuAcGcAAuAAcuGuuUU B | 724 |
| R-008321425-000J | 4302 | 89 | AAGGUACGCAAUAACUGUU | AACAGUUAUUGCGUACCUUUU | 729 |
| R-008321436-000K | 4295 | 52 | AUGCUACAAGGUACGCAAU | AUUGcGuAccuuGuAGcAuUU | 406 |
| R-008321436-000K | 4295 | 52 | AUGCUACAAGGUACGCAAU | B AuGcuAcAAGGuAcGcAAuUU B | 730 |
| R-008321438-000C | 4295 | 52 | AUGCUACAAGGUACGCAAU | B AGGCGACAAGGGACGCAAGUU B | 725 |
| R-008321438-000C | 4295 | 52 | AUGCUACAAGGUACGCAAU | AUUgCgUaCCUUgUagCaUUU | 731 |
| R-008321439-000L | 4295 | 52 | AUGCUACAAGGUACGCAAU | AUUGCGUACCUUGUAGCAUUU | 721 |
| R-008321439-000L | 4295 | 52 | AUGCUACAAGGUACGCAAU | B AGGCGACAAGGGACGCAAGUU B | 725 |
| R-008321440-000A | 4295 | 52 | AUGCUACAAGGUACGCAAU | AUUGCGUACCUUGUAGCAUUU | 722 |
| R-008321440-000A | 4295 | 52 | AUGCUACAAGGUACGCAAU | B AGGCGACAAGGGACGCAAGUU B | 725 |
| R-008321442-000T | 4302 | 89 | AAGGUACGCAAUAACUGUU | AACAGuuAuuGcGuAccuuUU | 501 |
| R-008321442-000T | 4302 | 89 | AAGGUACGCAAUAACUGUU | B AAGGUACGCAAUAACUGUUUU B | 732 |
| R-008321444-000K | 4302 | 89 | AAGGUACGCAAUAACUGUU | B AAGGGACGCAAGAACGGGGUU B | 723 |
| R-008321444-000K | 4302 | 89 | AAGGUACGCAAUAACUGUU | AACagUUaUUgCgUaCCUUUU | 733 |
| R-008321445-000U | 4302 | 89 | AAGGUACGCAAUAACUGUU | B AAGGGACGCAAGAACGGGGUU B | 723 |
| R-008321445-000U | 4302 | 89 | AAGGUACGCAAUAACUGUU | AACAGUUAUUGCGUACCUUUU | 729 |
| R-008321447-000L | 4302 | 89 | AAGGUACGCAAUAACUGUU | B AAGGUACGCAAUAACUGUUUU B | 732 |
| R-008321447-000L | 4302 | 89 | AAGGUACGCAAUAACUGUU | AACAGUUAUUGCGUACCUUUU | 734 |
| R-008321448-000V | 4302 | 89 | AAGGUACGCAAUAACUGUU | AACagUUaUUgCgUaCCUUUU | 726 |
| R-008321448-000V | 4302 | 89 | AAGGUACGCAAUAACUGUU | B AAGGUACGCAAUAACUGUUUU B | 732 |
| R-008321449-000D | 4302 | 89 | AAGGUACGCAAUAACUGUU | B AAGGuAcGcAAuAAcuGuuUU B | 724 |
| R-008321449-000D | 4302 | 89 | AAGGUACGCAAUAACUGUU | AACagUUaUUgCgUaCCUUUU | 726 |
| R-008321455-000L | 4295 | 52 | AUGCUACAAGGUACGCAAU | AuuGcGuAccuuGuAGcAuUU | 710 |
| R-008321455-000L | 4295 | 52 | AUGCUACAAGGUACGCAAU | B AGGCGACAAGGGACGCAAGUU B | 725 |
| R-008321456-000V | 4295 | 52 | AUGCUACAAGGUACGCAAU | AUUGCGUACCUUGUAGCAUUU | 721 |
| R-008321456-000V | 4295 | 52 | AUGCUACAAGGUACGCAAU | B AuGcuAcAAGGuAcGcAAuUU B | 727 |
| R-008321458-000M | 4302 | 89 | AAGGUACGCAAUAACUGUU | AACAGuuAuuGcGuAccuuUU | 501 |
| R-008321458-000M | 4302 | 89 | AAGGUACGCAAUAACUGUU | B AAGGuAcGcAAuAAcuGuuUU B | 735 |
| R-008321459-000W | 4302 | 89 | AAGGUACGCAAUAACUGUU | AAcAGuuAuuGcGuAccuuUU | 714 |
| R-008321459-000W | 4302 | 89 | AAGGUACGCAAUAACUGUU | B AAGGGACGCAAGAACGGGGUU B | 723 |
| R-008321465-000D | 4295 | 52 | AUGCUACAAGGUACGCAAU | AuuGcGuAccuuGuAGcAuUU | 710 |
| R-008321465-000D | 4295 | 52 | AUGCUACAAGGUACGCAAU | B AuGcuAcAAGGuAcGcAAuUU B | 727 |
| R-008321466-000M | 4295 | 52 | AUGCUACAAGGUACGCAAU | B AUGCUACAAGGUACGCAAUUU B | 720 |
| R-008321466-000M | 4295 | 52 | AUGCUACAAGGUACGCAAU | AUUgCgUaCCUUgUagCaUUU | 731 |
| R-008321467-000W | 4295 | 52 | AUGCUACAAGGUACGCAAU | B AGGCGACAAGGGACGCAAGUU B | 725 |
| R-008321467-000W | 4295 | 52 | AUGCUACAAGGUACGCAAU | AUUgCgUaCCUUgUagCaUUU | 728 |
| R-008321469-000N | 4295 | 52 | AUGCUACAAGGUACGCAAU | B AuGcuAcAAGGuAcGcAAuUU B | 727 |
| R-008321469-000N | 4295 | 52 | AUGCUACAAGGUACGCAAU | AUUgCgUaCCUUgUagCaUUU | 728 |
| R-008321470-000C | 4302 | 89 | AAGGUACGCAAUAACUGUU | B AAGGUACGCAAUAACUGUUUU B | 732 |
| R-008321470-000C | 4302 | 89 | AAGGUACGCAAUAACUGUU | AACagUUaUUgCgUaCCUUUU | 733 |
| R-008321471-000L | 4390 | 21 | GUUGAACUCAAUAAACCUU | AAGGuuuAuuGAGuucAAcUU | 299 |
| R-008321471-000L | 4390 | 21 | GUUGAACUCAAUAAACCUU | B GUUGAACUCAAUAAACCUUUU B | 736 |
| R-008321472-000V | 4302 | 89 | AAGGUACGCAAUAACUGUU | AACAGUUAUUGCGUACCUUUU | 729 |
| R-008321472-000V | 4302 | 89 | AAGGUACGCAAUAACUGUU | B AAGGUACGCAAUAACUGUUUU B | 732 |
| R-008321476-000E | 4390 | 21 | GUUGAACUCAAUAAACCUU | B GGGGAACGCAAGAAACCGGUU B | 737 |
| R-008321476-000E | 4390 | 21 | GUUGAACUCAAUAAACCUU | AAGgUUUaUUgagUUCaaCUU | 738 |
| R-008321479-000F | 4390 | 21 | GUUGAACUCAAUAAACCUU | B GUUGAACUCAAUAAACCUUUU B | 736 |
| R-008321479-000F | 4390 | 21 | GUUGAACUCAAUAAACCUU | AAGGUUUAUUGAGUUCAACUU | 739 |
| R-008321484-000E | 1056 | 26 | UGCUGACAUUGAACCCAAA | B uGcuGAcAuuGAAcccAAAUU B | 740 |
| R-008321484-000E | 1056 | 26 | UGCUGACAUUGAACCCAAA | UUUGGGUUCAAUGUCAGCAUU | 741 |
| R-008321489-000Y | 4295 | 52 | AUGCUACAAGGUACGCAAU | AuuGcGuAccuuGuAGcAuUU | 710 |
| R-008321489-000Y | 4295 | 52 | AUGCUACAAGGUACGCAAU | B AUGCUACAAGGUACGCAAUUU B | 720 |
| R-008321490-000M | 1056 | 26 | UGCUGACAUUGAACCCAAA | B UGCUGACAUUGAACCCAAAUU B | 742 |
| R-008321490-000M | 1056 | 26 | UGCUGACAUUGAACCCAAA | UUUGGGUUCAAUGUCAGCAUU | 743 |
| R-008321492-000E | 4295 | 52 | AUGCUACAAGGUACGCAAU | B AuGcuAcAAGGuAcGcAAuUU B | 727 |
| R-008321492-000E | 4295 | 52 | AUGCUACAAGGUACGCAAU | AUUgCgUaCCUUgUagCaUUU | 731 |
| R-008321494-000X | 1267 | 16 | GACGUCUUCUAGAGCCUUU | B GAcGucuucuAGAGccuuuUU B | 744 |
| R-008321494-000X | 1267 | 16 | GACGUCUUCUAGAGCCUUU | AAAggCUCUagaagaCgUCUU | 745 |
| R-008321495-000F | 4295 | 52 | AUGCUACAAGGUACGCAAU | AUUGCGUACCUUGUAGCAUUU | 722 |
| R-008321495-000F | 4295 | 52 | AUGCUACAAGGUACGCAAU | B AuGcuAcAAGGuAcGcAAuUU B | 727 |
| R-008321498-000G | 4302 | 89 | AAGGUACGCAAUAACUGUU | AAcAGuuAuuGcGuAccuuUU | 714 |
| R-008321498-000G | 4302 | 89 | AAGGUACGCAAUAACUGUU | B AAGGUACGCAAUAACUGUUUU B | 732 |
| R-008321499-000R | 1267 | 16 | GACGUCUUCUAGAGCCUUU | B GACGGCGGCGAGAGCCGGGUU B | 746 |
| R-008321499-000R | 1267 | 16 | GACGUCUUCUAGAGCCUUU | AAAGGCUCUAGAAGACGUCUU | 747 |
| R-008321502-000H | 4302 | 89 | AAGGUACGCAAUAACUGUU | AAcAGuuAuuGcGuAccuuUU | 714 |
| R-008321502-000H | 4302 | 89 | AAGGUACGCAAUAACUGUU | B AAGGuAcGcAAuAAcuGuuUU B | 724 |
| R-008321503-000S | 1106 | 18 | GUCGCAACCCUCAUGAAGU | B GGCGCAACCCGCAGGAAGGUU B | 748 |
| R-008321503-000S | 1106 | 18 | GUCGCAACCCUCAUGAAGU | ACUUCAUGAGGGUUGCGACUU | 749 |
| R-008321505-000J | 1106 | 18 | GUCGCAACCCUCAUGAAGU | ACUUCAUGAGGGUUGCGACUU | 749 |
| R-008321505-000J | 1106 | 18 | GUCGCAACCCUCAUGAAGU | B GucGcAAcccucAuGAAGuUU B | 750 |
| R-008321506-000T | 4302 | 89 | AAGGUACGCAAUAACUGUU | B AAGGuAcGcAAuAAcuGuuUU B | 724 |
| R-008321506-000T | 4302 | 89 | AAGGUACGCAAUAACUGUU | AACagUUaUUgCgUaCCUUUU | 733 |
| R-008321509-000U | 4302 | 89 | AAGGUACGCAAUAACUGUU | B AAGGGACGCAAGAACGGGGUU B | 723 |
| R-008321509-000U | 4302 | 89 | AAGGUACGCAAUAACUGUU | AACAGUUAUUGCGUACCUUUU | 734 |
| R-008321510-000H | 1106 | 18 | GUCGCAACCCUCAUGAAGU | B GUCGCAACCCUCAUGAAGUUU B | 751 |
| R-008321510-000H | 1106 | 18 | GUCGCAACCCUCAUGAAGU | ACUUCaUgagggUUgCgaCUU | 752 |
| R-008321511-000S | 4302 | 89 | AAGGUACGCAAUAACUGUU | B AAGGuAcGcAAuAAcuGuuUU B | 724 |
| R-008321511-000S | 4302 | 89 | AAGGUACGCAAUAACUGUU | AACAGUUAUUGCGUACCUUUU | 734 |
| R-008321512-000A | 1106 | 18 | GUCGCAACCCUCAUGAAGU | B GucGcAAcccucAuGAAGuUU B | 750 |
| R-008321512-000A | 1106 | 18 | GUCGCAACCCUCAUGAAGU | ACUUCaUgagggUUgCgaCUU | 752 |
| R-008321517-000U | 4390 | 21 | GUUGAACUCAAUAAACCUU | B GUUGAACUCAAUAAACCUUTT B | 753 |
| R-008321517-000U | 4390 | 21 | GUUGAACUCAAUAAACCUU | AAGGUUUAUUGAGUUCAACUU | 754 |
| R-008321520-000A | 4390 | 21 | GUUGAACUCAAUAAACCUU | AAGGuuuAuuGAGuucAAcUU | 299 |
| R-008321520-000A | 4390 | 21 | GUUGAACUCAAUAAACCUU | B GuuGAAcucAAuAAAccuuUU B | 755 |
| R-008321521-000J | 4390 | 21 | GUUGAACUCAAUAAACCUU | B GUUGAACUCAAUAAACCUUUU B | 736 |
| R-008321521-000J | 4390 | 21 | GUUGAACUCAAUAAACCUU | AAGgUUUaUUgagUUCaaCUU | 738 |
| R-008321523-000B | 4390 | 21 | GUUGAACUCAAUAAACCUU | B GUUGAACUCAAUAAACCUUUU B | 736 |
| R-008321523-000B | 4390 | 21 | GUUGAACUCAAUAAACCUU | AAGGUUUAUUGAGUUCAACUU | 756 |
| R-008321525-000U | 4390 | 21 | GUUGAACUCAAUAAACCUU | B GGGGAACGCAAGAAACCGGUU B | 737 |
| R-008321525-000U | 4390 | 21 | GUUGAACUCAAUAAACCUU | AAGgUUUaUUgagUUCaaCUU | 757 |
| R-008321527-000L | 1056 | 26 | UGCUGACAUUGAACCCAAA | UUUGGGuucAAuGucAGcAUU | 369 |
| R-008321527-000L | 1056 | 26 | UGCUGACAUUGAACCCAAA | B GGCGGACAGGGAACCCAAAUU B | 758 |
| R-008321529-000D | 1056 | 26 | UGCUGACAUUGAACCCAAA | B GGCGGACAGGGAACCCAAAUU B | 758 |
| R-008321529-000D | 1056 | 26 | UGCUGACAUUGAACCCAAA | UUUgggUUCaaUgUCagCaUU | 759 |
| R-008321531-000B | 1056 | 26 | UGCUGACAUUGAACCCAAA | B uGcuGAcAuuGAAcccAAAUU B | 740 |
| R-008321531-000B | 1056 | 26 | UGCUGACAUUGAACCCAAA | UUUgggUUCaaUgUCagCaUU | 760 |
| R-008321533-000U | 1267 | 16 | GACGUCUUCUAGAGCCUUU | B GACGGCGGCGAGAGCCGGGUU B | 746 |
| R-008321533-000U | 1267 | 16 | GACGUCUUCUAGAGCCUUU | AAAGGcucuAGAAGAcGucUU | 761 |
| R-008321536-000V | 1267 | 16 | GACGUCUUCUAGAGCCUUU | B GACGUCUUCUAGAGCCUUUUU B | 762 |
| R-008321536-000V | 1267 | 16 | GACGUCUUCUAGAGCCUUU | AAAGGCUCUAGAAGACGUCUU | 763 |
| R-008321537-000D | 1106 | 18 | GUCGCAACCCUCAUGAAGU | ACUucAuGAGGGuuGcGAcUU | 275 |
| R-008321537-000D | 1106 | 18 | GUCGCAACCCUCAUGAAGU | B GGCGCAACCCGCAGGAAGGUU B | 748 |
| R-008321539-000W | 1106 | 18 | GUCGCAACCCUCAUGAAGU | B GGCGCAACCCGCAGGAAGGUU B | 748 |
| R-008321539-000W | 1106 | 18 | GUCGCAACCCUCAUGAAGU | ACUUCaUgagggUUgCgaCUU | 764 |
| R-008321542-000C | 4390 | 21 | GUUGAACUCAAUAAACCUU | B GuuGAAcucAAuAAAccuuUU B | 765 |
| R-008321542-000C | 4390 | 21 | GUUGAACUCAAUAAACCUU | AAGGuuuAuuGAGuucAAcUU | 766 |
| R-008321543-000L | 4390 | 21 | GUUGAACUCAAUAAACCUU | AAGGuuuAuuGAGuucAAcUU | 299 |
| R-008321543-000L | 4390 | 21 | GUUGAACUCAAUAAACCUU | B GuuGAAcucAAuAAAccuuUU B | 765 |
| R-008321544-000V | 4390 | 21 | GUUGAACUCAAUAAACCUU | AAGGUUUAUUGAGUUCAACUU | 756 |
| R-008321544-000V | 4390 | 21 | GUUGAACUCAAUAAACCUU | B GuuGAAcucAAuAAAccuuUU B | 765 |
| R-008321547-000W | 1056 | 26 | UGCUGACAUUGAACCCAAA | uuuGGGuucAAuGucAGcAUU | 767 |
| R-008321547-000W | 1056 | 26 | UGCUGACAUUGAACCCAAA | B uGcuGAcAuuGAAcccAAATT B | 768 |
| R-008321548-000E | 1056 | 26 | UGCUGACAUUGAACCCAAA | B uGcuGAcAuuGAAcccAAAUU B | 740 |
| R-008321548-000E | 1056 | 26 | UGCUGACAUUGAACCCAAA | uuuGGGuucAAuGucAGcAUU | 767 |
| R-008321551-000L | 1267 | 16 | GACGUCUUCUAGAGCCUUU | B GACGUCUUCUAGAGCCUUUTT B | 769 |
| R-008321551-000L | 1267 | 16 | GACGUCUUCUAGAGCCUUU | AAAGGCUCUAGAAGACGUCUU | 770 |
| R-008321552-000V | 1267 | 16 | GACGUCUUCUAGAGCCUUU | AAAGGcucuAGAAGAcGucUU | 761 |
| R-008321552-000V | 1267 | 16 | GACGUCUUCUAGAGCCUUU | B GACGUCUUCUAGAGCCUUUUU B | 762 |
| R-008321553-000D | 1106 | 18 | GUCGCAACCCUCAUGAAGU | ACUucAuGAGGGuuGcGAcUU | 275 |
| R-008321553-000D | 1106 | 18 | GUCGCAACCCUCAUGAAGU | B GucGcAAcccucAuGAAGuUU B | 750 |
| R-008321554-000M | 1106 | 18 | GUCGCAACCCUCAUGAAGU | B GUCGCAACCCUCAUGAAGUUU B | 751 |
| R-008321554-000M | 1106 | 18 | GUCGCAACCCUCAUGAAGU | ACUUCaUgagggUUgCgaCUU | 764 |
| R-008321555-000W | 1106 | 18 | GUCGCAACCCUCAUGAAGU | B GucGcAAcccucAuGAAGuUU B | 750 |
| R-008321555-000W | 1106 | 18 | GUCGCAACCCUCAUGAAGU | ACUUCaUgagggUUgCgaCUU | 764 |
| R-008321557-000N | 1106 | 18 | GUCGCAACCCUCAUGAAGU | B GGCGCAACCCGCAGGAAGGUU B | 748 |
| R-008321557-000N | 1106 | 18 | GUCGCAACCCUCAUGAAGU | ACUUCAUGAGGGUUGCGACUU | 771 |
| R-008321558-000X | 1106 | 18 | GUCGCAACCCUCAUGAAGU | B GGCGCAACCCGCAGGAAGGUU B | 748 |
| R-008321558-000X | 1106 | 18 | GUCGCAACCCUCAUGAAGU | ACUUCaUgagggUUgCgaCUU | 752 |
| R-008321559-000F | 4390 | 21 | GUUGAACUCAAUAAACCUU | AAGgUUUaUUgagUUCaaCUU | 757 |
| R-008321559-000F | 4390 | 21 | GUUGAACUCAAUAAACCUU | B GuuGAAcucAAuAAAccuuUU B | 765 |
| R-008321560-000V | 1056 | 26 | UGCUGACAUUGAACCCAAA | UUUGGGUUCAAUGUCAGCAUU | 741 |
| R-008321560-000V | 1056 | 26 | UGCUGACAUUGAACCCAAA | B GGCGGACAGGGAACCCAAAUU B | 758 |
| R-008321561-000D | 1267 | 16 | GACGUCUUCUAGAGCCUUU | AAAGGcucuAGAAGAcGucUU | 269 |
| R-008321561-000D | 1267 | 16 | GACGUCUUCUAGAGCCUUU | B GACGGCGGCGAGAGCCGGGUU B | 746 |
| R-008321562-000M | 1267 | 16 | GACGUCUUCUAGAGCCUUU | AAAggCUCUagaagaCgUCUU | 745 |
| R-008321562-000M | 1267 | 16 | GACGUCUUCUAGAGCCUUU | B GACGGCGGCGAGAGCCGGGUU B | 746 |
| R-008321563-000W | 1267 | 16 | GACGUCUUCUAGAGCCUUU | B GAcGucuucuAGAGccuuuUU B | 744 |
| R-008321563-000W | 1267 | 16 | GACGUCUUCUAGAGCCUUU | AAAGGCUCUAGAAGACGUCUU | 747 |
| R-008321565-000N | 1106 | 18 | GUCGCAACCCUCAUGAAGU | ACUucAuGAGGGuuGcGAcUU | 275 |
| R-008321565-000N | 1106 | 18 | GUCGCAACCCUCAUGAAGU | B GucGcAAcccucAuGAAGuUU B | 772 |
| R-008321567-000F | 1106 | 18 | GUCGCAACCCUCAUGAAGU | B GGCGCAACCCGCAGGAAGGUU B | 748 |
| R-008321567-000F | 1106 | 18 | GUCGCAACCCUCAUGAAGU | AcuucAuGAGGGuuGcGAcUU | 773 |
| R-008321568-000P | 1106 | 18 | GUCGCAACCCUCAUGAAGU | B GUCGCAACCCUCAUGAAGUUU B | 751 |
| R-008321568-000P | 1106 | 18 | GUCGCAACCCUCAUGAAGU | AcuucAuGAGGGuuGcGAcUU | 773 |
| R-008321569-000Y | 1106 | 18 | GUCGCAACCCUCAUGAAGU | ACUucAuGAGGGuuGcGAcUU | 275 |
| R-008321569-000Y | 1106 | 18 | GUCGCAACCCUCAUGAAGU | B GUCGCAACCCUCAUGAAGUUU B | 751 |
| R-008321570-000M | 1106 | 18 | GUCGCAACCCUCAUGAAGU | B GucGcAAcccucAuGAAGuUU B | 750 |
| R-008321570-000M | 1106 | 18 | GUCGCAACCCUCAUGAAGU | ACUUCAUGAGGGUUGCGACUU | 771 |
| R-008321571-000W | 1106 | 18 | GUCGCAACCCUCAUGAAGU | ACUUCAUGAGGGUUGCGACUU | 749 |
| R-008321571-000W | 1106 | 18 | GUCGCAACCCUCAUGAAGU | B GUCGCAACCCUCAUGAAGUUU B | 751 |
| R-008321572-000E | 1056 | 26 | UGCUGACAUUGAACCCAAA | B UGCUGACAUUGAACCCAAAUU B | 742 |
| R-008321572-000E | 1056 | 26 | UGCUGACAUUGAACCCAAA | uuuGGGuucAAuGucAGcAUU | 767 |
| R-008321573-000N | 1056 | 26 | UGCUGACAUUGAACCCAAA | UUUGGGuucAAuGucAGcAUU | 369 |
| R-008321573-000N | 1056 | 26 | UGCUGACAUUGAACCCAAA | B uGcuGAcAuuGAAcccAAAUU B | 740 |
| R-008321574-000X | 1056 | 26 | UGCUGACAUUGAACCCAAA | B UGCUGACAUUGAACCCAAAUU B | 742 |
| R-008321574-000X | 1056 | 26 | UGCUGACAUUGAACCCAAA | UUUgggUUCaaUgUCagCaUU | 759 |
| R-008321575-000F | 1056 | 26 | UGCUGACAUUGAACCCAAA | B GGCGGACAGGGAACCCAAAUU B | 758 |
| R-008321575-000F | 1056 | 26 | UGCUGACAUUGAACCCAAA | UUUgggUUCaaUgUCagCaUU | 760 |
| R-008321576-000P | 1267 | 16 | GACGUCUUCUAGAGCCUUU | AAAGGcucuAGAAGAcGucUU | 269 |
| R-008321576-000P | 1267 | 16 | GACGUCUUCUAGAGCCUUU | B GACGUCUUCUAGAGCCUUUUU B | 762 |
| R-008321577-000Y | 1267 | 16 | GACGUCUUCUAGAGCCUUU | AAAGGcucuAGAAGAcGucUU | 269 |
| R-008321577-000Y | 1267 | 16 | GACGUCUUCUAGAGCCUUU | B GAcGucuucuAGAGccuuuUU B | 744 |
| R-008321580-000E | 1106 | 18 | GUCGCAACCCUCAUGAAGU | B GUCGCAACCCUCAUGAAGUTT B | 774 |
| R-008321580-000E | 1106 | 18 | GUCGCAACCCUCAUGAAGU | ACUUCAUGAGGGUUGCGACUU | 775 |
| R-008321582-000X | 4390 | 21 | GUUGAACUCAAUAAACCUU | AAGGuuuAuuGAGuucAAcUU | 766 |
| R-008321582-000X | 4390 | 21 | GUUGAACUCAAUAAACCUU | B GuuGAAcucAAuAAAccuuTT B | 776 |
| R-008321583-000F | 4390 | 21 | GUUGAACUCAAUAAACCUU | AAGGuuuAuuGAGuucAAcUU | 299 |
| R-008321583-000F | 4390 | 21 | GUUGAACUCAAUAAACCUU | B GGGGAACGCAAGAAACCGGUU B | 737 |
| R-008321586-000G | 1056 | 26 | UGCUGACAUUGAACCCAAA | B UGCUGACAUUGAACCCAAATT B | 777 |
| R-008321586-000G | 1056 | 26 | UGCUGACAUUGAACCCAAA | UUUGGGUUCAAUGUCAGCAUU | 778 |
| R-008321587-000R | 1056 | 26 | UGCUGACAUUGAACCCAAA | B GGCGGACAGGGAACCCAAAUU B | 758 |
| R-008321587-000R | 1056 | 26 | UGCUGACAUUGAACCCAAA | uuuGGGuucAAuGucAGcAUU | 767 |
| R-008321588-000Z | 1056 | 26 | UGCUGACAUUGAACCCAAA | UUUGGGuucAAuGucAGcAUU | 369 |
| R-008321588-000Z | 1056 | 26 | UGCUGACAUUGAACCCAAA | B UGCUGACAUUGAACCCAAAUU B | 742 |
| R-008321589-000H | 1056 | 26 | UGCUGACAUUGAACCCAAA | UUUGGGUUCAAUGUCAGCAUU | 741 |
| R-008321589-000H | 1056 | 26 | UGCUGACAUUGAACCCAAA | B UGCUGACAUUGAACCCAAAUU B | 742 |
| R-008321590-000X | 1056 | 26 | UGCUGACAUUGAACCCAAA | UUUGGGUUCAAUGUCAGCAUU | 743 |
| R-008321590-000X | 1056 | 26 | UGCUGACAUUGAACCCAAA | B GGCGGACAGGGAACCCAAAUU B | 758 |
| R-008321591-000F | 1056 | 26 | UGCUGACAUUGAACCCAAA | B uGcuGAcAuuGAAcccAAAUU B | 740 |
| R-008321591-000F | 1056 | 26 | UGCUGACAUUGAACCCAAA | UUUGGGUUCAAUGUCAGCAUU | 743 |
| R-008321593-000Y | 1267 | 16 | GACGUCUUCUAGAGCCUUU | AAAGGcucuAGAAGAcGucUU | 761 |
| R-008321593-000Y | 1267 | 16 | GACGUCUUCUAGAGCCUUU | B GAcGucuucuAGAGccuuuTT B | 779 |
| R-008321594-000G | 1267 | 16 | GACGUCUUCUAGAGCCUUU | AAAggCUCUagaagaCgUCUU | 745 |
| R-008321594-000G | 1267 | 16 | GACGUCUUCUAGAGCCUUU | B GACGUCUUCUAGAGCCUUUUU B | 762 |
| R-008321595-000R | 1267 | 16 | GACGUCUUCUAGAGCCUUU | B GAcGucuucuAGAGccuuuUU B | 744 |
| R-008321595-000R | 1267 | 16 | GACGUCUUCUAGAGCCUUU | AAAGGCUCUAGAAGACGUCUU | 763 |
| R-008321597-000H | 1267 | 16 | GACGUCUUCUAGAGCCUUU | B GAcGucuucuAGAGccuuuUU B | 744 |
| R-008321597-000H | 1267 | 16 | GACGUCUUCUAGAGCCUUU | AAAggCUCUagaagaCgUCUU | 780 |
| R-008321598-000S | 4390 | 21 | GUUGAACUCAAUAAACCUU | B GGGGAACGCAAGAAACCGGUU B | 737 |
| R-008321598-000S | 4390 | 21 | GUUGAACUCAAUAAACCUU | AAGGuuuAuuGAGuucAAcUU | 766 |
| R-008321599-000A | 4390 | 21 | GUUGAACUCAAUAAACCUU | AAGgUUUaUUgagUUCaaCUU | 738 |
| R-008321599-000A | 4390 | 21 | GUUGAACUCAAUAAACCUU | B GuuGAAcucAAuAAAccuuUU B | 765 |
| R-008321600-000A | 4390 | 21 | GUUGAACUCAAUAAACCUU | B GGGGAACGCAAGAAACCGGUU B | 737 |
| R-008321600-000A | 4390 | 21 | GUUGAACUCAAUAAACCUU | AAGGUUUAUUGAGUUCAACUU | 739 |
| R-008321601-000J | 4390 | 21 | GUUGAACUCAAUAAACCUU | AAGGUUUAUUGAGUUCAACUU | 739 |
| R-008321601-000J | 4390 | 21 | GUUGAACUCAAUAAACCUU | B GuuGAAcucAAuAAAccuuUU B | 765 |
| R-008321603-000B | 1056 | 26 | UGCUGACAUUGAACCCAAA | UUUGGGuucAAuGucAGcAUU | 369 |
| R-008321603-000B | 1056 | 26 | UGCUGACAUUGAACCCAAA | B uGcuGAcAuuGAAcccAAAUU B | 781 |
| R-008321604-000K | 1056 | 26 | UGCUGACAUUGAACCCAAA | B uGcuGAcAuuGAAcccAAAUU B | 740 |
| R-008321604-000K | 1056 | 26 | UGCUGACAUUGAACCCAAA | UUUgggUUCaaUgUCagCaUU | 759 |
| R-008321606-000C | 1267 | 16 | GACGUCUUCUAGAGCCUUU | AAAGGcucuAGAAGAcGucUU | 269 |
| R-008321606-000C | 1267 | 16 | GACGUCUUCUAGAGCCUUU | B GAcGucuucuAGAGccuuuUU B | 782 |
| R-008321607-000L | 1267 | 16 | GACGUCUUCUAGAGCCUUU | B GAcGucuucuAGAGccuuuUU B | 744 |
| R-008321607-000L | 1267 | 16 | GACGUCUUCUAGAGCCUUU | AAAGGcucuAGAAGAcGucUU | 761 |
| R-008321608-000V | 1267 | 16 | GACGUCUUCUAGAGCCUUU | AAAGGCUCUAGAAGACGUCUU | 747 |
| R-008321608-000V | 1267 | 16 | GACGUCUUCUAGAGCCUUU | B GACGUCUUCUAGAGCCUUUUU B | 762 |
| R-008321609-000D | 1267 | 16 | GACGUCUUCUAGAGCCUUU | B GACGUCUUCUAGAGCCUUUUU B | 762 |
| R-008321609-000D | 1267 | 16 | GACGUCUUCUAGAGCCUUU | AAAggCUCUagaagaCgUCUU | 780 |
| R-008321610-000T | 1106 | 18 | GUCGCAACCCUCAUGAAGU | B GucGcAAcccucAuGAAGuUU B | 750 |
| R-008321610-000T | 1106 | 18 | GUCGCAACCCUCAUGAAGU | AcuucAuGAGGGuuGcGAcUU | 773 |
| R-008321611-000B | 1106 | 18 | GUCGCAACCCUCAUGAAGU | B GUCGCAACCCUCAUGAAGUUU B | 751 |
| R-008321611-000B | 1106 | 18 | GUCGCAACCCUCAUGAAGU | ACUUCAUGAGGGUUGCGACUU | 771 |
| R-008321612-000K | 4390 | 21 | GUUGAACUCAAUAAACCUU | B GUUGAACUCAAUAAACCUUUU B | 736 |
| R-008321612-000K | 4390 | 21 | GUUGAACUCAAUAAACCUU | AAGGuuuAuuGAGuucAAcUU | 766 |
| R-008321613-000U | 4390 | 21 | GUUGAACUCAAUAAACCUU | B GGGGAACGCAAGAAACCGGUU B | 737 |
| R-008321613-000U | 4390 | 21 | GUUGAACUCAAUAAACCUU | AAGGUUUAUUGAGUUCAACUU | 756 |
| R-008321614-000C | 4390 | 21 | GUUGAACUCAAUAAACCUU | B GUUGAACUCAAUAAACCUUUU B | 736 |
| R-008321614-000C | 4390 | 21 | GUUGAACUCAAUAAACCUU | AAGgUUUaUUgagUUCaaCUU | 757 |
| R-008321615-000L | 1056 | 26 | UGCUGACAUUGAACCCAAA | B UGCUGACAUUGAACCCAAAUU B | 742 |
| R-008321615-000L | 1056 | 26 | UGCUGACAUUGAACCCAAA | UUUgggUUCaaUgUCagCaUU | 760 |
| R-008321616-000V | 1267 | 16 | GACGUCUUCUAGAGCCUUU | B GACGGCGGCGAGAGCCGGGUU B | 746 |
| R-008321616-000V | 1267 | 16 | GACGUCUUCUAGAGCCUUU | AAAGGCUCUAGAAGACGUCUU | 763 |
| R-008321617-000D | 1267 | 16 | GACGUCUUCUAGAGCCUUU | B GACGGCGGCGAGAGCCGGGUU B | 746 |
| R-008321617-000D | 1267 | 16 | GACGUCUUCUAGAGCCUUU | AAAggCUCUagaagaCgUCUU | 780 |
| R-008321619-000W | 1106 | 18 | GUCGCAACCCUCAUGAAGU | AcuucAuGAGGGuuGcGAcUU | 773 |
| R-008321619-000W | 1106 | 18 | GUCGCAACCCUCAUGAAGU | B GucGcAAcccucAuGAAGuTT B | 783 |
| R-008321621-000U | 4295 | 52 | AUGCUACAAGGUACGCAAU | AUUgCgUaCCUUgUagCaUUU | 731 |
| R-008321621-000U | 4295 | 52 | AUGCUACAAGGUACGCAAU | B AUGCUACAAGGUACGCAAUUU B | 784 |
| R-008321623-000L | 4302 | 89 | AAGGUACGCAAUAACUGUU | AACAGUUAUUGCGUACCUUUU | 729 |
| R-008321623-000L | 4302 | 89 | AAGGUACGCAAUAACUGUU | B AAGGUACGCAAUAACUGUUUU B | 785 |
| R-008321628-000E | 4295 | 52 | AUGCUACAAGGUACGCAAU | AUUGcGuAccuuGuAGcAuUU | 406 |
| R-008321628-000E | 4295 | 52 | AUGCUACAAGGUACGCAAU | B AUGCUACAAGGUACGCAAUUU B | 784 |
| R-008321629-000N | 4302 | 89 | AAGGUACGCAAUAACUGUU | AAcAGuuAuuGcGuAccuuUU | 714 |
| R-008321629-000N | 4302 | 89 | AAGGUACGCAAUAACUGUU | B AAGGUACGCAAUAACUGUUUU B | 785 |
| R-008321634-000M | 4295 | 52 | AUGCUACAAGGUACGCAAU | AUUGCGUACCUUGUAGCAUUU | 722 |
| R-008321634-000M | 4295 | 52 | AUGCUACAAGGUACGCAAU | B AUGCUACAAGGUACGCAAUUU B | 784 |
| R-008321635-000W | 4302 | 89 | AAGGUACGCAAUAACUGUU | AACAGuuAuuGcGuAccuuUU | 501 |
| R-008321635-000W | 4302 | 89 | AAGGUACGCAAUAACUGUU | B AAGGUACGCAAUAACUGUUUU B | 785 |
| R-008321639-000F | 4302 | 89 | AAGGUACGCAAUAACUGUU | AACagUUaUUgCgUaCCUUUU | 726 |
| R-008321639-000F | 4302 | 89 | AAGGUACGCAAUAACUGUU | B AAGGUACGCAAUAACUGUUUU B | 785 |
| R-008321642-000M | 4295 | 52 | AUGCUACAAGGUACGCAAU | AuuGcGuAccuuGuAGcAuUU | 710 |
| R-008321642-000M | 4295 | 52 | AUGCUACAAGGUACGCAAU | B AUGCUACAAGGUACGCAAUUU B | 784 |
| R-008321643-000W | 4295 | 52 | AUGCUACAAGGUACGCAAU | AUUGCGUACCUUGUAGCAUUU | 721 |
| R-008321643-000W | 4295 | 52 | AUGCUACAAGGUACGCAAU | B AUGCUACAAGGUACGCAAUUU B | 784 |
| R-008321644-000E | 4295 | 52 | AUGCUACAAGGUACGCAAU | AUUgCgUaCCUUgUagCaUUU | 728 |
| R-008321644-000E | 4295 | 52 | AUGCUACAAGGUACGCAAU | B AUGCUACAAGGUACGCAAUUU B | 784 |
| R-008321645-000N | 1106 | 18 | GUCGCAACCCUCAUGAAGU | ACUUCaUgagggUUgCgaCUU | 752 |
| R-008321645-000N | 1106 | 18 | GUCGCAACCCUCAUGAAGU | B GUCGCAACCCUCAUGAAGUUU B | 786 |
| R-008321646-000X | 4302 | 89 | AAGGUACGCAAUAACUGUU | AACagUUaUUgCgUaCCUUUU | 733 |
| R-008321646-000X | 4302 | 89 | AAGGUACGCAAUAACUGUU | B AAGGUACGCAAUAACUGUUUU B | 785 |
| R-008321649-000Y | 4390 | 21 | GUUGAACUCAAUAAACCUU | AAGgUUUaUUgagUUCaaCUU | 738 |
| R-008321649-000Y | 4390 | 21 | GUUGAACUCAAUAAACCUU | B GUUGAACUCAAUAAACCUUUU B | 787 |
| R-008321652-000E | 4302 | 89 | AAGGUACGCAAUAACUGUU | AACAGUUAUUGCGUACCUUUU | 734 |
| R-008321652-000E | 4302 | 89 | AAGGUACGCAAUAACUGUU | B AAGGUACGCAAUAACUGUUUU B | 785 |
| R-008321653-000N | 1056 | 26 | UGCUGACAUUGAACCCAAA | UUUgggUUCaaUgUCagCaUU | 759 |
| R-008321653-000N | 1056 | 26 | UGCUGACAUUGAACCCAAA | B UGCUGACAUUGAACCCAAAUU B | 788 |
| R-008321654-000X | 4390 | 21 | GUUGAACUCAAUAAACCUU | AAGGuuuAuuGAGuucAAcUU | 299 |
| R-008321654-000X | 4390 | 21 | GUUGAACUCAAUAAACCUU | B GUUGAACUCAAUAAACCUUUU B | 787 |
| R-008321655-000F | 1056 | 26 | UGCUGACAUUGAACCCAAA | UUUGGGUUCAAUGUCAGCAUU | 741 |
| R-008321655-000F | 1056 | 26 | UGCUGACAUUGAACCCAAA | B UGCUGACAUUGAACCCAAAUU B | 788 |
| R-008321656-000P | 1106 | 18 | GUCGCAACCCUCAUGAAGU | AcuucAuGAGGGuuGcGAcUU | 773 |
| R-008321656-000P | 1106 | 18 | GUCGCAACCCUCAUGAAGU | B GUCGCAACCCUCAUGAAGUUU B | 786 |
| R-008321657-000Y | 4390 | 21 | GUUGAACUCAAUAAACCUU | AAGgUUUaUUgagUUCaaCUU | 757 |
| R-008321657-000Y | 4390 | 21 | GUUGAACUCAAUAAACCUU | B GUUGAACUCAAUAAACCUUUU B | 787 |
| R-008321658-000G | 4390 | 21 | GUUGAACUCAAUAAACCUU | AAGGUUUAUUGAGUUCAACUU | 739 |
| R-008321658-000G | 4390 | 21 | GUUGAACUCAAUAAACCUU | B GUUGAACUCAAUAAACCUUUU B | 787 |
| R-008321660-000E | 1267 | 16 | GACGUCUUCUAGAGCCUUU | AAAGGcucuAGAAGAcGucUU | 761 |
| R-008321660-000E | 1267 | 16 | GACGUCUUCUAGAGCCUUU | B GACGUCUUCUAGAGCCUUUUU B | 789 |
| R-008321661-000N | 1106 | 18 | GUCGCAACCCUCAUGAAGU | ACUUcAuGAGGGuuGcGAcUU | 275 |
| R-008321661-000N | 1106 | 18 | GUCGCAACCCUCAUGAAGU | B GUCGCAACCCUCAUGAAGUUU B | 786 |
| R-008321662-000X | 1106 | 18 | GUCGCAACCCUCAUGAAGU | ACUUCAUGAGGGUUGCGACUU | 749 |
| R-008321662-000X | 1106 | 18 | GUCGCAACCCUCAUGAAGU | B GUCGCAACCCUCAUGAAGUUU B | 786 |
| R-008321663-000F | 4390 | 21 | GUUGAACUCAAUAAACCUU | AAGGuuuAuuGAGuucAAcUU | 766 |
| R-008321663-000F | 4390 | 21 | GUUGAACUCAAUAAACCUU | B GUUGAACUCAAUAAACCUUUU B | 787 |
| R-008321664-000P | 1056 | 26 | UGCUGACAUUGAACCCAAA | UUUGGGuucAAuGucAGcAUU | 369 |
| R-008321664-000P | 1056 | 26 | UGCUGACAUUGAACCCAAA | B UGCUGACAUUGAACCCAAAUU B | 788 |
| R-008321665-000Y | 4390 | 21 | GUUGAACUCAAUAAACCUU | AAGGUUUAUUGAGUUCAACUU | 756 |
| R-008321665-000Y | 4390 | 21 | GUUGAACUCAAUAAACCUU | B GUUGAACUCAAUAAACCUUUU B | 787 |
| R-008321666-000G | 1056 | 26 | UGCUGACAUUGAACCCAAA | uuuGGGuucAAuGucAGcAUU | 767 |
| R-008321666-000G | 1056 | 26 | UGCUGACAUUGAACCCAAA | B UGCUGACAUUGAACCCAAAUU B | 788 |
| R-008321667-000R | 1056 | 26 | UGCUGACAUUGAACCCAAA | UUUGGGUUCAAUGUCAGCAUU | 743 |
| R-008321667-000R | 1056 | 26 | UGCUGACAUUGAACCCAAA | B UGCUGACAUUGAACCCAAAUU B | 788 |
| R-008321668-000Z | 1056 | 26 | UGCUGACAUUGAACCCAAA | UUUgggUUCaaUgUCagCaUU | 760 |
| R-008321668-000Z | 1056 | 26 | UGCUGACAUUGAACCCAAA | B UGCUGACAUUGAACCCAAAUU B | 788 |
| R-008321669-000H | 1267 | 16 | GACGUCUUCUAGAGCCUUU | AAAGGcucuAGAAGAcGucUU | 269 |
| R-008321669-000H | 1267 | 16 | GACGUCUUCUAGAGCCUUU | B GACGUCUUCUAGAGCCUUUUU B | 789 |
| R-008321670-000X | 1267 | 16 | GACGUCUUCUAGAGCCUUU | AAAggCUCUagaagaCgUCUU | 745 |
| R-008321670-000X | 1267 | 16 | GACGUCUUCUAGAGCCUUU | B GACGUCUUCUAGAGCCUUUUU B | 789 |
| R-008321671-000F | 1267 | 16 | GACGUCUUCUAGAGCCUUU | AAAGGCUCUAGAAGACGUCUU | 747 |
| R-008321671-000F | 1267 | 16 | GACGUCUUCUAGAGCCUUU | B GACGUCUUCUAGAGCCUUUUU B | 789 |
| R-008321672-000P | 1267 | 16 | GACGUCUUCUAGAGCCUUU | AAAGGCUCUAGAAGACGUCUU | 763 |
| R-008321672-000P | 1267 | 16 | GACGUCUUCUAGAGCCUUU | B GACGUCUUCUAGAGCCUUUUU B | 789 |
| R-008321673-000Y | 1267 | 16 | GACGUCUUCUAGAGCCUUU | AAAggCUCUagaagaCgUCUU | 780 |
| R-008321673-000Y | 1267 | 16 | GACGUCUUCUAGAGCCUUU | B GACGUCUUCUAGAGCCUUUUU B | 789 |
| R-008321674-000G | 1106 | 18 | GUCGCAACCCUCAUGAAGU | ACUUCaUgagggUUgCgaCUU | 764 |
| R-008321674-000G | 1106 | 18 | GUCGCAACCCUCAUGAAGU | B GUCGCAACCCUCAUGAAGUUU B | 786 |
| R-008321675-000R | 1106 | 18 | GUCGCAACCCUCAUGAAGU | ACUUCAUGAGGGUUGCGACUU | 771 |
| R-008321675-000R | 1106 | 18 | GUCGCAACCCUCAUGAAGU | B GUCGCAACCCUCAUGAAGUUU B | 786 |
| R-008324201-000D | 955 | 7 | GAUGGAAGAUGUGUGACAU | AUGucAcAcAucuuccAucUU | 218 |
| R-008324201-000D | 955 | 7 | GAUGGAAGAUGUGUGACAU | B GAUGGAAGAUGUGUGACAUUU B | 790 |
| R-008324204-000E | 955 | 7 | GAUGGAAGAUGUGUGACAU | B GAuGGAAGAuGuGuGAcAuUU B | 791 |
| R-008324204-000E | 955 | 7 | GAUGGAAGAUGUGUGACAU | AUGUCACACAUCUUCCAUCUU | 792 |
| R-008324206-000X | 955 | 7 | GAUGGAAGAUGUGUGACAU | B GAUGGAAGAUGUGUGACAUUU B | 790 |
| R-008324206-000X | 955 | 7 | GAUGGAAGAUGUGUGACAU | AUGUCaCaCaUCUUCCaUCUU | 793 |
| R-008324209-000Y | 962 | 1 | GAUGUGUGACAUGUAUAUA | B GAUGUGUGACAUGUAUAUAUU B | 794 |
| R-008324209-000Y | 962 | 1 | GAUGUGUGACAUGUAUAUA | UAUaUaCaUgUCaCaCaUCUU | 795 |
| R-008324212-000E | 959 | 22 | GAAGAUGUGUGACAUGUAU | B GAAGAUGUGUGACAUGUAUUU B | 796 |
| R-008324212-000E | 959 | 22 | GAAGAUGUGUGACAUGUAU | AuAcAuGucAcAcAucuucUU | 797 |
| R-008324215-000F | 959 | 22 | GAAGAUGUGUGACAUGUAU | B GAAGAUGUGUGACAUGUAUUU B | 798 |
| R-008324215-000F | 959 | 22 | GAAGAUGUGUGACAUGUAU | AUACAUGUCACACAUCUUCUU | 799 |
| R-008324218-000G | 962 | 1 | GAUGUGUGACAUGUAUAUA | B GAuGuGuGAcAuGuAuAuAUU B | 800 |
| R-008324218-000G | 962 | 1 | GAUGUGUGACAUGUAUAUA | UAUaUaCaUgUCaCaCaUCUU | 801 |
| R-008324220-000E | 959 | 22 | GAAGAUGUGUGACAUGUAU | B GAAGAUGUGUGACAUGUAUUU B | 796 |
| R-008324220-000E | 959 | 22 | GAAGAUGUGUGACAUGUAU | AUACAUGUCACACAUCUUCUU | 802 |
| R-008324223-000F | 964 | 8 | UGUGUGACAUGUAUAUAUU | B UGUGUGACAUGUAUAUAUUUU B | 803 |
| R-008324223-000F | 964 | 8 | UGUGUGACAUGUAUAUAUU | AAUaUaUaCaUgUCaCaCaUU | 804 |
| R-008324225-000Y | 964 | 8 | UGUGUGACAUGUAUAUAUU | B UGUGUGACAUGUAUAUAUUUU B | 803 |
| R-008324225-000Y | 964 | 8 | UGUGUGACAUGUAUAUAUU | AAUAUAUACAUGUCACACAUU | 805 |
| R-008324227-000R | 955 | 7 | GAUGGAAGAUGUGUGACAU | B GAuGGAAGAuGuGuGAcAuUU B | 791 |
| R-008324227-000R | 955 | 7 | GAUGGAAGAUGUGUGACAU | AUGUCaCaCaUCUUCCaUCUU | 806 |
| R-008324230-000X | 955 | 7 | GAUGGAAGAUGUGUGACAU | B GAUGGAAGAUGUGUGACAUUU B | 807 |
| R-008324230-000X | 955 | 7 | GAUGGAAGAUGUGUGACAU | AUGUCACACAUCUUCCAUCUU | 808 |
| R-008324232-000P | 962 | 1 | GAUGUGUGACAUGUAUAUA | B GAUGUGUGACAUGUAUAUAUU B | 794 |
| R-008324232-000P | 962 | 1 | GAUGUGUGACAUGUAUAUA | UAUAUACAUGUCACACAUCUU | 809 |
| R-008324234-000G | 962 | 1 | GAUGUGUGACAUGUAUAUA | UAUaUaCaUgUCaCaCaUCUU | 795 |
| R-008324234-000G | 962 | 1 | GAUGUGUGACAUGUAUAUA | B GAUGUGUGACAUGUAUAUAUU B | 810 |
| R-008324236-000Z | 959 | 22 | GAAGAUGUGUGACAUGUAU | AUAcAuGucAcAcAucuucUU | 301 |
| R-008324236-000Z | 959 | 22 | GAAGAUGUGUGACAUGUAU | B GAAGAuGuGuGAcAuGuAuUU B | 811 |
| R-008324239-000A | 959 | 22 | GAAGAUGUGUGACAUGUAU | B GAAGAuGuGuGAcAuGuAuUU B | 812 |
| R-008324239-000A | 959 | 22 | GAAGAUGUGUGACAUGUAU | AUACaUgUCaCaCaUCUUCUU | 813 |
| R-008324242-000G | 962 | 1 | GAUGUGUGACAUGUAUAUA | uAuAuAcAuGucAcAcAucUU | 814 |
| R-008324242-000G | 962 | 1 | GAUGUGUGACAUGUAUAUA | B GAuGuGuGAcAuGuAuAuATT B | 815 |
| R-008324243-000R | 962 | 1 | GAUGUGUGACAUGUAUAUA | B GAUGUGUGACAUGUAUAUAUU B | 794 |
| R-008324243-000R | 962 | 1 | GAUGUGUGACAUGUAUAUA | uAuAuAcAuGucAcAcAucUU | 814 |
| R-008324246-000S | 964 | 8 | UGUGUGACAUGUAUAUAUU | B uGuGuGAcAuGuAuAuAuuTT B | 816 |
| R-008324246-000S | 964 | 8 | UGUGUGACAUGUAUAUAUU | AAuAuAuAcAuGucAcAcAUU | 817 |
| R-008324247-000A | 955 | 7 | GAUGGAAGAUGUGUGACAU | AUGUCaCaCaUCUUCCaUCUU | 793 |
| R-008324247-000A | 955 | 7 | GAUGGAAGAUGUGUGACAU | B GAUGGAAGAUGUGUGACAUUU B | 807 |
| R-008324248-000J | 962 | 1 | GAUGUGUGACAUGUAUAUA | B GAuGuGuGAcAuGuAuAuAUU B | 800 |
| R-008324248-000J | 962 | 1 | GAUGUGUGACAUGUAUAUA | UAUAUACAUGUCACACAUCUU | 809 |
| R-008324251-000R | 959 | 22 | GAAGAUGUGUGACAUGUAU | B GAAGAUGUGUGACAUGUAUTT B | 818 |
| R-008324251-000R | 959 | 22 | GAAGAUGUGUGACAUGUAU | AUACAUGUCACACAUCUUCUU | 819 |
| R-008324253-000H | 959 | 22 | GAAGAUGUGUGACAUGUAU | AuAcAuGucAcAcAucuucUU | 797 |
| R-008324253-000H | 959 | 22 | GAAGAUGUGUGACAUGUAU | B GAAGAuGuGuGAcAuGuAuTT B | 820 |
| R-008324254-000S | 959 | 22 | GAAGAUGUGUGACAUGUAU | B GAAGAUGUGUGACAUGUAUUU B | 796 |
| R-008324254-000S | 959 | 22 | GAAGAUGUGUGACAUGUAU | AUACaUgUCaCaCaUCUUCUU | 813 |
| R-008324256-000J | 964 | 8 | UGUGUGACAUGUAUAUAUU | AAUaUaUaCaUgUCaCaCaUU | 804 |
| R-008324256-000J | 964 | 8 | UGUGUGACAUGUAUAUAUU | B uGuGuGAcAuGuAuAuAuuUU B | 821 |
| R-008324257-000T | 964 | 8 | UGUGUGACAUGUAUAUAUU | AAUAUAUACAUGUCACACAUU | 805 |
| R-008324257-000T | 964 | 8 | UGUGUGACAUGUAUAUAUU | B uGuGuGAcAuGuAuAuAuuUU B | 821 |
| R-008324260-000Z | 955 | 7 | GAUGGAAGAUGUGUGACAU | B GAUGGAAGAUGUGUGACAUTT B | 822 |
| R-008324260-000Z | 955 | 7 | GAUGGAAGAUGUGUGACAU | AUGUCACACAUCUUCCAUCUU | 823 |
| R-008324261-000H | 962 | 1 | GAUGUGUGACAUGUAUAUA | UAUaUaCaUgUCaCaCaUCUU | 795 |
| R-008324261-000H | 962 | 1 | GAUGUGUGACAUGUAUAUA | B GAuGuGuGAcAuGuAuAuAUU B | 800 |
| R-008324262-000S | 959 | 22 | GAAGAUGUGUGACAUGUAU | AUAcAuGucAcAcAucuucUU | 301 |
| R-008324262-000S | 959 | 22 | GAAGAUGUGUGACAUGUAU | B GAAGAUGUGUGACAUGUAUUU B | 798 |
| R-008324263-000A | 959 | 22 | GAAGAUGUGUGACAUGUAU | AUAcAuGucAcAcAucuucUU | 301 |
| R-008324263-000A | 959 | 22 | GAAGAUGUGUGACAUGUAU | B GAAGAUGUGUGACAUGUAUUU B | 796 |
| R-008324264-000J | 959 | 22 | GAAGAUGUGUGACAUGUAU | B GAAGAUGUGUGACAUGUAUUU B | 796 |
| R-008324264-000J | 959 | 22 | GAAGAUGUGUGACAUGUAU | AUACAUGUCACACAUCUUCUU | 799 |
| R-008324265-000T | 962 | 1 | GAUGUGUGACAUGUAUAUA | B GAUGUGUGACAUGUAUAUAUU B | 794 |
| R-008324265-000T | 962 | 1 | GAUGUGUGACAUGUAUAUA | UAUaUaCaUgUCaCaCaUCUU | 801 |
| R-008324267-000K | 964 | 8 | UGUGUGACAUGUAUAUAUU | AAUAuAuAcAuGucAcAcAUU | 223 |
| R-008324267-000K | 964 | 8 | UGUGUGACAUGUAUAUAUU | B uGuGuGAcAuGuAuAuAuuUU B | 824 |
| R-008324269-000C | 964 | 8 | UGUGUGACAUGUAUAUAUU | AAuAuAuAcAuGucAcAcAUU | 817 |
| R-008324269-000C | 964 | 8 | UGUGUGACAUGUAUAUAUU | B UGUGUGACAUGUAUAUAUUUU B | 825 |
| R-008324270-000S | 964 | 8 | UGUGUGACAUGUAUAUAUU | AAUAuAuAcAuGucAcAcAUU | 223 |
| R-008324270-000S | 964 | 8 | UGUGUGACAUGUAUAUAUU | B UGUGUGACAUGUAUAUAUUUU B | 803 |
| R-008324272-000J | 964 | 8 | UGUGUGACAUGUAUAUAUU | B uGuGuGAcAuGuAuAuAuuUU B | 821 |
| R-008324272-000J | 964 | 8 | UGUGUGACAUGUAUAUAUU | AAUaUaUaCaUgUCaCaCaUU | 826 |
| R-008324275-000K | 955 | 7 | GAUGGAAGAUGUGUGACAU | B GAuGGAAGAuGuGuGAcAuTT B | 827 |
| R-008324275-000K | 955 | 7 | GAUGGAAGAUGUGUGACAU | AuGucAcAcAucuuccAucUU | 828 |
| R-008324276-000U | 955 | 7 | GAUGGAAGAUGUGUGACAU | AUGucAcAcAucuuccAucUU | 218 |
| R-008324276-000U | 955 | 7 | GAUGGAAGAUGUGUGACAU | B GAUGGAAGAUGUGUGACAUUU B | 807 |
| R-008324277-000C | 955 | 7 | GAUGGAAGAUGUGUGACAU | B GAuGGAAGAuGuGuGAcAuUU B | 791 |
| R-008324277-000C | 955 | 7 | GAUGGAAGAUGUGUGACAU | AUGUCaCaCaUCUUCCaUCUU | 793 |
| R-008324279-000V | 962 | 1 | GAUGUGUGACAUGUAUAUA | B GAuGuGuGAcAuGuAuAuAUU B | 800 |
| R-008324279-000V | 962 | 1 | GAUGUGUGACAUGUAUAUA | UAUAUACAUGUCACACAUCUU | 829 |
| R-008324280-000J | 962 | 1 | GAUGUGUGACAUGUAUAUA | B GAUGUGUGACAUGUAUAUAUU B | 810 |
| R-008324280-000J | 962 | 1 | GAUGUGUGACAUGUAUAUA | uAuAuAcAuGucAcAcAucUU | 814 |
| R-008324281-000T | 962 | 1 | GAUGUGUGACAUGUAUAUA | UAUAuAcAuGucAcAcAucUU | 184 |
| R-008324281-000T | 962 | 1 | GAUGUGUGACAUGUAUAUA | B GAUGUGUGACAUGUAUAUAUU B | 794 |
| R-008324282-000B | 962 | 1 | GAUGUGUGACAUGUAUAUA | UAUAuAcAuGucAcAcAucUU | 184 |
| R-008324282-000B | 962 | 1 | GAUGUGUGACAUGUAUAUA | B GAuGuGuGAcAuGuAuAuAUU B | 800 |
| R-008324283-000K | 964 | 8 | UGUGUGACAUGUAUAUAUU | AAuAuAuAcAuGucAcAcAUU | 817 |
| R-008324283-000K | 964 | 8 | UGUGUGACAUGUAUAUAUU | B uGuGuGAcAuGuAuAuAuuUU B | 821 |
| R-008324284-000U | 964 | 8 | UGUGUGACAUGUAUAUAUU | AAUaUaUaCaUgUCaCaCaUU | 804 |
| R-008324284-000U | 964 | 8 | UGUGUGACAUGUAUAUAUU | B UGUGUGACAUGUAUAUAUUUU B | 825 |
| R-008324285-000C | 964 | 8 | UGUGUGACAUGUAUAUAUU | B UGUGUGACAUGUAUAUAUUUU B | 825 |
| R-008324285-000C | 964 | 8 | UGUGUGACAUGUAUAUAUU | AAUaUaUaCaUgUCaCaCaUU | 826 |
| R-008324287-000V | 955 | 7 | GAUGGAAGAUGUGUGACAU | AUGucAcAcAucuuccAucUU | 218 |
| R-008324287-000V | 955 | 7 | GAUGGAAGAUGUGUGACAU | B GAuGGAAGAuGuGuGAcAuUU B | 830 |
| R-008324288-000D | 955 | 7 | GAUGGAAGAUGUGUGACAU | B GAUGGAAGAUGUGUGACAUUU B | 790 |
| R-008324288-000D | 955 | 7 | GAUGGAAGAUGUGUGACAU | AuGucAcAcAucuuccAucUU | 828 |
| R-008324289-000M | 955 | 7 | GAUGGAAGAUGUGUGACAU | AUGUCaCaCaUCUUCCaUCUU | 806 |
| R-008324289-000M | 955 | 7 | GAUGGAAGAUGUGUGACAU | B GAUGGAAGAUGUGUGACAUUU B | 807 |
| R-008324290-000B | 955 | 7 | GAUGGAAGAUGUGUGACAU | B GAUGGAAGAUGUGUGACAUUU B | 790 |
| R-008324290-000B | 955 | 7 | GAUGGAAGAUGUGUGACAU | AUGUCACACAUCUUCCAUCUU | 808 |
| R-008324291-000K | 962 | 1 | GAUGUGUGACAUGUAUAUA | B GAUGUGUGACAUGUAUAUAUU B | 794 |
| R-008324291-000K | 962 | 1 | GAUGUGUGACAUGUAUAUA | UAUAUACAUGUCACACAUCUU | 829 |
| R-008324292-000U | 959 | 22 | GAAGAUGUGUGACAUGUAU | AuAcAuGucAcAcAucuucUU | 797 |
| R-008324292-000U | 959 | 22 | GAAGAUGUGUGACAUGUAU | B GAAGAUGUGUGACAUGUAUUU B | 798 |
| R-008324293-000C | 959 | 22 | GAAGAUGUGUGACAUGUAU | B GAAGAUGUGUGACAUGUAUUU B | 798 |
| R-008324293-000C | 959 | 22 | GAAGAUGUGUGACAUGUAU | AUACaUgUCaCaCaUCUUCUU | 813 |
| R-008324294-000L | 959 | 22 | GAAGAUGUGUGACAUGUAU | AUACAUGUCACACAUCUUCUU | 799 |
| R-008324294-000L | 959 | 22 | GAAGAUGUGUGACAUGUAU | B GAAGAuGuGuGAcAuGuAuUU B | 812 |
| R-008324295-000V | 964 | 8 | UGUGUGACAUGUAUAUAUU | AAUAuAuAcAuGucAcAcAUU | 223 |
| R-008324295-000V | 964 | 8 | UGUGUGACAUGUAUAUAUU | B UGUGUGACAUGUAUAUAUUUU B | 825 |
| R-008324296-000D | 955 | 7 | GAUGGAAGAUGUGUGACAU | B GAuGGAAGAuGuGuGAcAuUU B | 791 |
| R-008324296-000D | 955 | 7 | GAUGGAAGAUGUGUGACAU | AuGucAcAcAucuuccAucUU | 828 |
| R-008324297-000M | 955 | 7 | GAUGGAAGAUGUGUGACAU | AUGucAcAcAucuuccAucUU | 218 |
| R-008324297-000M | 955 | 7 | GAUGGAAGAUGUGUGACAU | B GAuGGAAGAuGuGuGAcAuUU B | 791 |
| R-008324298-000W | 955 | 7 | GAUGGAAGAUGUGUGACAU | B GAUGGAAGAUGUGUGACAUUU B | 790 |
| R-008324298-000W | 955 | 7 | GAUGGAAGAUGUGUGACAU | AUGUCaCaCaUCUUCCaUCUU | 806 |
| R-008324299-000E | 955 | 7 | GAUGGAAGAUGUGUGACAU | B GAuGGAAGAuGuGuGAcAuUU B | 791 |
| R-008324299-000E | 955 | 7 | GAUGGAAGAUGUGUGACAU | AUGUCACACAUCUUCCAUCUU | 808 |
| R-008324300-000E | 955 | 7 | GAUGGAAGAUGUGUGACAU | AUGUCACACAUCUUCCAUCUU | 792 |
| R-008324300-000E | 955 | 7 | GAUGGAAGAUGUGUGACAU | B GAUGGAAGAUGUGUGACAUUU B | 807 |
| R-008324301-000N | 962 | 1 | GAUGUGUGACAUGUAUAUA | UAUAUACAUGUCACACAUCUU | 809 |
| R-008324301-000N | 962 | 1 | GAUGUGUGACAUGUAUAUA | B GAUGUGUGACAUGUAUAUAUU B | 810 |
| R-008324302-000X | 959 | 22 | GAAGAUGUGUGACAUGUAU | AuAcAuGucAcAcAucuucUU | 797 |
| R-008324302-000X | 959 | 22 | GAAGAUGUGUGACAUGUAU | B GAAGAuGuGuGAcAuGuAuUU B | 812 |
| R-008324303-000F | 959 | 22 | GAAGAUGUGUGACAUGUAU | B GAAGAUGUGUGACAUGUAUUU B | 798 |
| R-008324303-000F | 959 | 22 | GAAGAUGUGUGACAUGUAU | AUACAUGUCACACAUCUUCUU | 802 |
| R-008324306-000G | 962 | 1 | GAUGUGUGACAUGUAUAUA | B GAUGUGUGACAUGUAUAUATT B | 831 |
| R-008324306-000G | 962 | 1 | GAUGUGUGACAUGUAUAUA | UAUAUACAUGUCACACAUCUU | 832 |
| R-008324307-000R | 962 | 1 | GAUGUGUGACAUGUAUAUA | UAUaUaCaUgUCaCaCaUCUU | 801 |
| R-008324307-000R | 962 | 1 | GAUGUGUGACAUGUAUAUA | B GAUGUGUGACAUGUAUAUAUU B | 810 |
| R-008324309-000H | 959 | 22 | GAAGAUGUGUGACAUGUAU | B GAAGAUGUGUGACAUGUAUUU B | 796 |
| R-008324309-000H | 959 | 22 | GAAGAUGUGUGACAUGUAU | AUACaUgUCaCaCaUCUUCUU | 833 |
| R-008324310-000X | 959 | 22 | GAAGAUGUGUGACAUGUAU | B GAAGAuGuGuGAcAuGuAuUU B | 812 |
| R-008324310-000X | 959 | 22 | GAAGAUGUGUGACAUGUAU | AUACaUgUCaCaCaUCUUCUU | 833 |
| R-008324313-000Y | 964 | 8 | UGUGUGACAUGUAUAUAUU | B UGUGUGACAUGUAUAUAUUTT B | 834 |
| R-008324313-000Y | 964 | 8 | UGUGUGACAUGUAUAUAUU | AAUAUAUACAUGUCACACAUU | 835 |
| R-008324314-000G | 964 | 8 | UGUGUGACAUGUAUAUAUU | B UGUGUGACAUGUAUAUAUUUU B | 803 |
| R-008324314-000G | 964 | 8 | UGUGUGACAUGUAUAUAUU | AAUAuAuAcAuGucAcAcAUU | 817 |
| R-008324315-000R | 964 | 8 | UGUGUGACAUGUAUAUAUU | AAUAuAuAcAuGucAcAcAUU | 223 |
| R-008324315-000R | 964 | 8 | UGUGUGACAUGUAUAUAUU | B uGuGuGAcAuGuAuAuAuuUU B | 821 |
| R-008324317-000H | 964 | 8 | UGUGUGACAUGUAUAUAUU | B UGUGUGACAUGUAUAUAUUUU B | 825 |
| R-008324317-000H | 964 | 8 | UGUGUGACAUGUAUAUAUU | AAUAUAUACAUGUCACACAUU | 836 |
| R-008324318-000S | 964 | 8 | UGUGUGACAUGUAUAUAUU | AAUAUAUACAUGUCACACAUU | 805 |
| R-008324318-000S | 964 | 8 | UGUGUGACAUGUAUAUAUU | B UGUGUGACAUGUAUAUAUUUU B | 825 |
| R-008324319-000A | 964 | 8 | UGUGUGACAUGUAUAUAUU | B UGUGUGACAUGUAUAUAUUUU B | 803 |
| R-008324319-000A | 964 | 8 | UGUGUGACAUGUAUAUAUU | AAUaUaUaCaUgUCaCaCaUU | 826 |
| R-008324320-000P | 955 | 7 | GAUGGAAGAUGUGUGACAU | B GAUGGAAGAUGUGUGACAUUU B | 807 |
| R-008324320-000P | 955 | 7 | GAUGGAAGAUGUGUGACAU | AuGucAcAcAucuuccAucUU | 828 |
| R-008324321-000Y | 955 | 7 | GAUGGAAGAUGUGUGACAU | B GAUGGAAGAUGUGUGACAUUU B | 790 |
| R-008324321-000Y | 955 | 7 | GAUGGAAGAUGUGUGACAU | AUGUCACACAUCUUCCAUCUU | 792 |
| R-008324322-000G | 962 | 1 | GAUGUGUGACAUGUAUAUA | B GAUGUGUGACAUGUAUAUAUU B | 810 |
| R-008324322-000G | 962 | 1 | GAUGUGUGACAUGUAUAUA | UAUAUACAUGUCACACAUCUU | 829 |
| R-008324323-000R | 959 | 22 | GAAGAUGUGUGACAUGUAU | AUAcAuGucAcAcAucuucUU | 301 |
| R-008324323-000R | 959 | 22 | GAAGAUGUGUGACAUGUAU | B GAAGAuGuGuGAcAuGuAuUU B | 812 |
| R-008324325-000H | 962 | 1 | GAUGUGUGACAUGUAUAUA | UAUAuAcAuGucAcAcAucUU | 184 |
| R-008324325-000H | 962 | 1 | GAUGUGUGACAUGUAUAUA | B GAuGuGuGAcAuGuAuAuAUU B | 837 |
| R-008324326-000S | 962 | 1 | GAUGUGUGACAUGUAUAUA | B GAuGuGuGAcAuGuAuAuAUU B | 800 |
| R-008324326-000S | 962 | 1 | GAUGUGUGACAUGUAUAUA | uAuAuAcAuGucAcAcAucUU | 814 |
| R-008324327-000A | 962 | 1 | GAUGUGUGACAUGUAUAUA | UAUAuAcAuGucAcAcAucUU | 184 |
| R-008324327-000A | 962 | 1 | GAUGUGUGACAUGUAUAUA | B GAUGUGUGACAUGUAUAUAUU B | 810 |
| R-008324328-000J | 959 | 22 | GAAGAUGUGUGACAUGUAU | AUACAUGUCACACAUCUUCUU | 802 |
| R-008324328-000J | 959 | 22 | GAAGAUGUGUGACAUGUAU | B GAAGAuGuGuGAcAuGuAuUU B | 812 |
| R-008324329-000T | 959 | 22 | GAAGAUGUGUGACAUGUAU | B GAAGAUGUGUGACAUGUAUUU B | 798 |
| R-008324329-000T | 959 | 22 | GAAGAUGUGUGACAUGUAU | AUACaUgUCaCaCaUCUUCUU | 833 |
| R-008324330-000G | 964 | 8 | UGUGUGACAUGUAUAUAUU | B UGUGUGACAUGUAUAUAUUUU B | 803 |
| R-008324330-000G | 964 | 8 | UGUGUGACAUGUAUAUAUU | AAUAUAUACAUGUCACACAUU | 836 |
| R-008324331-000R | 964 | 8 | UGUGUGACAUGUAUAUAUU | B uGuGuGAcAuGuAuAuAuuUU B | 821 |
| R-008324331-000R | 964 | 8 | UGUGUGACAUGUAUAUAUU | AAUAUAUACAUGUCACACAUU | 836 |
| R-008350293-000S | 932 | 3 | GUCAUGUUGAUAAUCCAAA | B GucAuGuuGAuAAuccAAAUsU B | 838 |
| R-008350293-000S | 932 | 3 | GUCAUGUUGAUAAUCCAAA | UUUggaUUaUCaaCaUgaCUsU | 839 |
| R-008350296-000T | 932 | 3 | GUCAUGUUGAUAAUCCAAA | uuuGGAuuAucAAcAuGAcUsU | 840 |
| R-008350296-000T | 932 | 3 | GUCAUGUUGAUAAUCCAAA | B GUCAUGUUGAUAAUCCAAAUsU B | 841 |
| R-008350299-000U | 923 | 2 | GUUAUGUACGUCAUGUUGA | B GuuAuGuAcGucAuGuuGAUsU B | 842 |
| R-008350299-000U | 923 | 2 | GUUAUGUACGUCAUGUUGA | UCAAcAuGAcGuAcAuAAcUsU | 843 |
| R-008350302-000L | 923 | 2 | GUUAUGUACGUCAUGUUGA | ucAAcAuGAcGuAcAuAAcUsU | 844 |
| R-008350302-000L | 923 | 2 | GUUAUGUACGUCAUGUUGA | B GUUAUGUACGUCAUGUUGAUsU B | 845 |
| R-008350306-000W | 918 | 6 | AACGGGUUAUGUACGUCAU | B AAcGGGuuAuGuAcGucAuUsU B | 846 |
| R-008350306-000W | 918 | 6 | AACGGGUUAUGUACGUCAU | AUGAcGuAcAuAAcccGuuUsU | 847 |
| R-008350308-000N | 918 | 6 | AACGGGUUAUGUACGUCAU | AUGAcGuAcAuAAcccGuuUsU | 847 |
| R-008350308-000N | 918 | 6 | AACGGGUUAUGUACGUCAU | B AACGGGUUAUGUACGUCAUUsU B | 848 |
| R-008350314-000W | 932 | 3 | GUCAUGUUGAUAAUCCAAA | B GucAuGuuGAuAAuccAAAUsU B | 838 |
| R-008350314-000W | 932 | 3 | GUCAUGUUGAUAAUCCAAA | UUUGGAUUAUCAACAUGACUsU | 849 |
| R-008350317-000X | 932 | 3 | GUCAUGUUGAUAAUCCAAA | B GucAuGuuGAuAAuccAAAUsU B | 838 |
| R-008350317-000X | 932 | 3 | GUCAUGUUGAUAAUCCAAA | UUUggaUUaUCaaCaUgaCUsU | 850 |
| R-008350573-000L | 923 | 2 | GUUAUGUACGUCAUGUUGA | B GUUAUGUACGUCAUGUUGAUsU B | 845 |
| R-008350573-000L | 923 | 2 | GUUAUGUACGUCAUGUUGA | UCAaCaUgaCgUaCaUaaCUsU | 851 |
| R-008350575-000D | 923 | 2 | GUUAUGUACGUCAUGUUGA | ucAAcAuGAcGuAcAuAAcUsU | 844 |
| R-008350575-000D | 923 | 2 | GUUAUGUACGUCAUGUUGA | B GUUAUGUACGUCAUGUUGAUsU B | 852 |
| R-008350577-000W | 918 | 6 | AACGGGUUAUGUACGUCAU | B AAcGGGuuAuGuAcGucAuUsU B | 846 |
| R-008350577-000W | 918 | 6 | AACGGGUUAUGUACGUCAU | AUGaCgUaCaUaaCCCgUUUsU | 853 |
| R-008350579-000N | 918 | 6 | AACGGGUUAUGUACGUCAU | B AAcGGGuuAuGuAcGucAuUsU B | 846 |
| R-008350579-000N | 918 | 6 | AACGGGUUAUGUACGUCAU | AUGACGUACAUAACCCGUUUsU | 854 |
| R-008350581-000L | 918 | 6 | AACGGGUUAUGUACGUCAU | AUGACGUACAUAACCCGUUUsU | 854 |
| R-008350581-000L | 918 | 6 | AACGGGUUAUGUACGUCAU | B AACGGGUUAUGUACGUCAUUsU B | 855 |
| R-008350587-000N | 932 | 3 | GUCAUGUUGAUAAUCCAAA | UUUggaUUaUCaaCaUgaCUsU | 839 |
| R-008350587-000N | 932 | 3 | GUCAUGUUGAUAAUCCAAA | B GUCAUGUUGAUAAUCCAAAUsU B | 841 |
| R-008350590-000V | 932 | 3 | GUCAUGUUGAUAAUCCAAA | B GUCAUGUUGAUAAUCCAAAUsU B | 856 |
| R-008350590-000V | 932 | 3 | GUCAUGUUGAUAAUCCAAA | UUUGGAUUAUCAACAUGACUsU | 857 |
| R-008350593-000W | 932 | 3 | GUCAUGUUGAUAAUCCAAA | B GucAuGuuGAuAAuccAAATsT B | 858 |
| R-008350593-000W | 932 | 3 | GUCAUGUUGAUAAUCCAAA | UUUGGAuuAucAAcAuGAcUsU | 859 |
| R-008350596-000X | 932 | 3 | GUCAUGUUGAUAAUCCAAA | B GUCAUGUUGAUAAUCCAAAUsU B | 860 |
| R-008350596-000X | 932 | 3 | GUCAUGUUGAUAAUCCAAA | UUUGGAUUAUCAACAUGACUsU | 861 |
| R-008350598-000P | 923 | 2 | GUUAUGUACGUCAUGUUGA | B GuuAuGuAcGucAuGuuGAUsU B | 842 |
| R-008350598-000P | 923 | 2 | GUUAUGUACGUCAUGUUGA | UCAACAUGACGUACAUAACUSU | 862 |
| R-008350599-000Y | 923 | 2 | GUUAUGUACGUCAUGUUGA | B GUUAUGUACGUCAUGUUGAUsU B | 852 |
| R-008350599-000Y | 923 | 2 | GUUAUGUACGUCAUGUUGA | UCAACAUGACGUACAUAACUsU | 862 |
| R-008350601-000G | 923 | 2 | GUUAUGUACGUCAUGUUGA | B GUUAUGUACGUCAUGUUGAUsU B | 852 |
| R-008350601-000G | 923 | 2 | GUUAUGUACGUCAUGUUGA | UCAACAUGACGUACAUAACUsU | 863 |
| R-008350603-000Z | 923 | 2 | GUUAUGUACGUCAUGUUGA | B GUUAUGUACGUCAUGUUGAUsU B | 852 |
| R-008350603-000Z | 923 | 2 | GUUAUGUACGUCAUGUUGA | UCAaCaUgaCgUaCaUaaCUsU | 864 |
| R-008350605-000S | 918 | 6 | AACGGGUUAUGUACGUCAU | B AACGGGUUAUGUACGUCAUUsU B | 848 |
| R-008350605-000S | 918 | 6 | AACGGGUUAUGUACGUCAU | AUGACGUACAUAACCCGUUUsU | 865 |
| R-008350607-000J | 918 | 6 | AACGGGUUAUGUACGUCAU | AUGAcGuAcAuAAcccGuuUsU | 847 |
| R-008350607-000J | 918 | 6 | AACGGGUUAUGUACGUCAU | B AAcGGGuuAuGuAcGucAuTsT B | 866 |
| R-008350611-000Z | 932 | 3 | GUCAUGUUGAUAAUCCAAA | B GucAuGuuGAuAAuccAAAUsU B | 838 |
| R-008350611-000Z | 932 | 3 | GUCAUGUUGAUAAUCCAAA | uuuGGAuuAucAAcAuGAcUsU | 840 |
| R-008350612-000H | 923 | 2 | GUUAUGUACGUCAUGUUGA | B GuuAuGuAcGucAuGuuGAUsU B | 842 |
| R-008350612-000H | 923 | 2 | GUUAUGUACGUCAUGUUGA | UCAACAUGACGUACAUAACUsU | 863 |
| R-008350613-000S | 923 | 2 | GUUAUGUACGUCAUGUUGA | B GuuAuGuAcGucAuGuuGAUsU B | 842 |
| R-008350613-000S | 923 | 2 | GUUAUGUACGUCAUGUUGA | ucAAcAuGAcGuAcAuAAcUsU | 844 |
| R-008350615-000J | 923 | 2 | GUUAUGUACGUCAUGUUGA | ucAAcAuGAcGuAcAuAAcUsU | 844 |
| R-008350615-000J | 923 | 2 | GUUAUGUACGUCAUGUUGA | B GuuAuGuAcGucAuGuuGAUsU B | 867 |
| R-008350617-000B | 918 | 6 | AACGGGUUAUGUACGUCAU | B AACGGGUUAUGUACGUCAUUsU B | 848 |
| R-008350617-000B | 918 | 6 | AACGGGUUAUGUACGUCAU | AUGaCgUaCaUaaCCCgUUUsU | 868 |
| R-008350619-000U | 918 | 6 | AACGGGUUAUGUACGUCAU | B AACGGGUUAUGUACGUCAUUsU B | 855 |
| R-008350619-000U | 918 | 6 | AACGGGUUAUGUACGUCAU | AuGAcGuAcAuAAcccGuuUsU | 869 |
| R-008350625-000B | 932 | 3 | GUCAUGUUGAUAAUCCAAA | B GUCAUGUUGAUAAUCCAAAUsU B | 841 |
| R-008350625-000B | 932 | 3 | GUCAUGUUGAUAAUCCAAA | UUUGGAUUAUCAACAUGACUsU | 857 |
| R-008350626-000K | 932 | 3 | GUCAUGUUGAUAAUCCAAA | B GUCAUGUUGAUAAUCCAAAUsU B | 856 |
| R-008350626-000K | 932 | 3 | GUCAUGUUGAUAAUCCAAA | UUUGGAuuAucAAcAuGAcUsU | 859 |
| R-008350627-000U | 923 | 2 | GUUAUGUACGUCAUGUUGA | UCAaCaUgaCgUaCaUaaCUsU | 851 |
| R-008350627-000U | 923 | 2 | GUUAUGUACGUCAUGUUGA | B GUUAUGUACGUCAUGUUGAUsU B | 852 |
| R-008350628-000C | 923 | 2 | GUUAUGUACGUCAUGUUGA | B GuuAuGuAcGucAuGuuGAUsU B | 842 |
| R-008350628-000C | 923 | 2 | GUUAUGUACGUCAUGUUGA | UCAaCaUgaCgUaCaUaaCUsU | 864 |
| R-008350629-000L | 923 | 2 | GUUAUGUACGUCAUGUUGA | B GUUAUGUACGUCAUGUUGAUsU B | 845 |
| R-008350629-000L | 923 | 2 | GUUAUGUACGUCAUGUUGA | UCAaCaUgaCgUaCaUaaCUsU | 864 |
| R-008350630-000A | 923 | 2 | GUUAUGUACGUCAUGUUGA | UcAAcAuGAcGuAcAuAAcUsU | 843 |
| R-008350630-000A | 923 | 2 | GUUAUGUACGUCAUGUUGA | B GUUAUGUACGUCAUGUUGAUsU B | 845 |
| R-008350632-000T | 923 | 2 | GUUAUGUACGUCAUGUUGA | UcAAcAuGAcGuAcAuAAcUsU | 843 |
| R-008350632-000T | 923 | 2 | GUUAUGUACGUCAUGUUGA | B GuuAuGuAcGucAuGuuGATsT B | 870 |
| R-008350633-000B | 918 | 6 | AACGGGUUAUGUACGUCAU | AUGaCgUaCaUaaCCCgUUUsU | 853 |
| R-008350633-000B | 918 | 6 | AACGGGUUAUGUACGUCAU | B AACGGGUUAUGUACGUCAUUsU B | 855 |
| R-008350635-000U | 932 | 3 | GUCAUGUUGAUAAUCCAAA | UUUggaUUaUCaaCaUgaCUsU | 839 |
| R-008350635-000U | 932 | 3 | GUCAUGUUGAUAAUCCAAA | B GUCAUGUUGAUAAUCCAAAUsU B | 856 |
| R-008350636-000C | 932 | 3 | GUCAUGUUGAUAAUCCAAA | B GucAuGuuGAuAAuccAAAUsU B | 838 |
| R-008350636-000C | 932 | 3 | GUCAUGUUGAUAAUCCAAA | UUUGGAUUAUCAACAUGACUsU | 857 |
| R-008350637-000L | 932 | 3 | GUCAUGUUGAUAAUCCAAA | B GucAuGuuGAuAAuccAAAUsU B | 838 |
| R-008350637-000L | 932 | 3 | GUCAUGUUGAUAAUCCAAA | UUUGGAuuAucAAcAuGAcUsU | 859 |
| R-008350638-000V | 932 | 3 | GUCAUGUUGAUAAUCCAAA | uuuGGAuuAucAAcAuGAcUsU | 840 |
| R-008350638-000V | 932 | 3 | GUCAUGUUGAUAAUCCAAA | B GUCAUGUUGAUAAUCCAAAUsU B | 856 |
| R-008350640-000T | 932 | 3 | GUCAUGUUGAUAAUCCAAA | UUUGGAuuAucAAcAuGAcUsU | 859 |
| R-008350640-000T | 932 | 3 | GUCAUGUUGAUAAUCCAAA | B GucAuGuuGAuAAuccAAAUsU B | 871 |
| R-008350641-000B | 923 | 2 | GUUAUGUACGUCAUGUUGA | B GuuAuGuAcGucAuGuuGAUsU B | 842 |
| R-008350641-000B | 923 | 2 | GUUAUGUACGUCAUGUUGA | UCAaCaUgaCgUaCaUaaCUsU | 851 |
| R-008350642-000K | 923 | 2 | GUUAUGUACGUCAUGUUGA | B GUUAUGUACGUCAUGUUGAUsU B | 845 |
| R-008350642-000K | 923 | 2 | GUUAUGUACGUCAUGUUGA | UCAACAUGACGUACAUAACUsU | 862 |
| R-008350643-000U | 923 | 2 | GUUAUGUACGUCAUGUUGA | B GUUAUGUACGUCAUGUUGAUsU B | 845 |
| R-008350643-000U | 923 | 2 | GUUAUGUACGUCAUGUUGA | UCAACAUGACGUACAUAACUsU | 863 |
| R-008350644-000C | 918 | 6 | AACGGGUUAUGUACGUCAU | B AAcGGGuuAuGuAcGucAuUsU B | 846 |
| R-008350644-000C | 918 | 6 | AACGGGUUAUGUACGUCAU | AUGaCgUaCaUaaCCCgUUUsU | 868 |
| R-008350647-000D | 918 | 6 | AACGGGUUAUGUACGUCAU | B AACGGGUUAUGUACGUCAUUsU B | 872 |
| R-008350647-000D | 918 | 6 | AACGGGUUAUGUACGUCAU | AUGACGUACAUAACCCGUUUsU | 873 |
| R-008350670-000V | 932 | 3 | GUCAUGUUGAUAAUCCAAA | UUUGGAUUAUCAACAUGACUsU | 849 |
| R-008350670-000V | 932 | 3 | GUCAUGUUGAUAAUCCAAA | B GUCAUGUUGAUAAUCCAAAUsU B | 856 |
| R-008350674-000E | 932 | 3 | GUCAUGUUGAUAAUCCAAA | UUUggaUUaUCaaCaUgaCUsU | 850 |
| R-008350674-000E | 932 | 3 | GUCAUGUUGAUAAUCCAAA | B GUCAUGUUGAUAAUCCAAAUsU B | 856 |
| R-008350676-000X | 918 | 6 | AACGGGUUAUGUACGUCAU | B AACGGGUUAUGUACGUCAUUsU B | 855 |
| R-008350676-000X | 918 | 6 | AACGGGUUAUGUACGUCAU | AUGaCgUaCaUaaCCCgUUUsU | 868 |
| R-008350678-000P | 918 | 6 | AACGGGUUAUGUACGUCAU | AUGAcGuAcAuAAcccGuuUsU | 847 |
| R-008350678-000P | 918 | 6 | AACGGGUUAUGUACGUCAU | B AACGGGUUAUGUACGUCAUUsU B | 855 |
| R-008350680-000M | 918 | 6 | AACGGGUUAUGUACGUCAU | B AAcGGGuuAuGuAcGucAuUsU B | 846 |
| R-008350680-000M | 918 | 6 | AACGGGUUAUGUACGUCAU | AuGAcGuAcAuAAcccGuuUsU | 869 |
| R-008350684-000X | 918 | 6 | AACGGGUUAUGUACGUCAU | AUGAcGuAcAuAAcccGuuUsU | 847 |
| R-008350684-000X | 918 | 6 | AACGGGUUAUGUACGUCAU | B AAcGGGuuAuGuAcGucAuUsU B | 874 |
| R-008350688-000G | 918 | 6 | AACGGGUUAUGUACGUCAU | AuGAcGuAcAuAAcccGuuUsU | 869 |
| R-008350688-000G | 918 | 6 | AACGGGUUAUGUACGUCAU | B AAcGGGuuAuGuAcGucAuUsU B | 875 |
| R-008350696-000G | 932 | 3 | GUCAUGUUGAUAAUCCAAA | B GUCAUGUUGAUAAUCCAAAUsU B | 841 |
| R-008350696-000G | 932 | 3 | GUCAUGUUGAUAAUCCAAA | UUUGGAUUAUCAACAUGACUsU | 849 |
| R-008350698-000Z | 932 | 3 | GUCAUGUUGAUAAUCCAAA | B GUCAUGUUGAUAAUCCAAAUsU B | 841 |
| R-008350698-000Z | 932 | 3 | GUCAUGUUGAUAAUCCAAA | UUUggaUUaUCaaCaUgaCUsU | 850 |
| R-008350702-000A | 932 | 3 | GUCAUGUUGAUAAUCCAAA | B GUCAUGUUGAUAAUCCAAAUsU B | 841 |
| R-008350702-000A | 932 | 3 | GUCAUGUUGAUAAUCCAAA | UUUGGAuuAucAAcAuGAcUsU | 859 |
| R-008350705-000B | 932 | 3 | GUCAUGUUGAUAAUCCAAA | uuuGGAuuAucAAcAuGAcUsU | 840 |
| R-008350705-000B | 932 | 3 | GUCAUGUUGAUAAUCCAAA | B GucAuGuuGAuAAuccAAAUsU B | 876 |
| R-008350708-000C | 923 | 2 | GUUAUGUACGUCAUGUUGA | UCAAcAuGAcGuAcAuAAcUsU | 843 |
| R-008350708-000C | 923 | 2 | GUUAUGUACGUCAUGUUGA | B GUUAUGUACGUCAUGUUGAUsU B | 852 |
| R-008350712-000T | 923 | 2 | GUUAUGUACGUCAUGUUGA | UCAAcAuGAcGuAcAuAAcUsU | 843 |
| R-008350712-000T | 923 | 2 | GUUAUGUACGUCAUGUUGA | B GuuAuGuAcGucAuGuuGAUsU B | 877 |
| R-008350717-000L | 923 | 2 | GUUAUGUACGUCAUGUUGA | B GUUAUGUACGUCAUGUUGAUsU B | 878 |
| R-008350717-000L | 923 | 2 | GUUAUGUACGUCAUGUUGA | UCAACAUGACGUACAUAACUsU | 879 |
| R-008350719-000D | 918 | 6 | AACGGGUUAUGUACGUCAU | B AACGGGUUAUGUACGUCAUUsU B | 848 |
| R-008350719-000D | 918 | 6 | AACGGGUUAUGUACGUCAU | AUGaCgUaCaUaaCCCgUUUsU | 853 |
| R-008350722-000K | 918 | 6 | AACGGGUUAUGUACGUCAU | B AACGGGUUAUGUACGUCAUUsU B | 848 |
| R-008350722-000K | 918 | 6 | AACGGGUUAUGUACGUCAU | AUGACGUACAUAACCCGUUUsU | 854 |
| R-008350724-000C | 918 | 6 | AACGGGUUAUGUACGUCAU | B AAcGGGuuAuGuAcGucAuUsU B | 846 |
| R-008350724-000C | 918 | 6 | AACGGGUUAUGUACGUCAU | AUGACGUACAUAACCCGUUUsU | 865 |
| R-008350727-000D | 918 | 6 | AACGGGUUAUGUACGUCAU | B AACGGGUUAUGUACGUCAUUsU B | 855 |
| R-008350727-000D | 918 | 6 | AACGGGUUAUGUACGUCAU | AUGACGUACAUAACCCGUUUsU | 865 |
| R-008350730-000K | 918 | 6 | AACGGGUUAUGUACGUCAU | B AACGGGUUAUGUACGUCAUUsU B | 848 |
| R-008350730-000K | 918 | 6 | AACGGGUUAUGUACGUCAU | AuGAcGuAcAuAAcccGuuUsU | 869 |
| R-008039829-001W | 263 | 1049 | GGACUUCUCUCAAUUUUCU | ccuGAAGAGAGuuAAAAGAUU | 1053 |
| R-008039829-001W | 263 | 1049 | GGACUUCUCUCAAUUUUCU | B ucuuuuAAcucucuucAGGTT B | 1054 |
| R-008053961-001S | 1129 | 1050 | CUUGUUUGUGGUACUUCAU | B cuuGuuuGuGGuAcuucAuTT B | 1055 |
| R-008053961-001S | 1129 | 1050 | CUUGUUUGUGGUACUUCAU | AUGAAGuAccAcAAAcAAGUU | 1056 |
| R-008054086-001B | 1486 | 1051 | GAAAGGUGUUCAAGUACCA | B GAAAGGuGuucAAGuAccATT B | 1057 |
| R-008054086-001B | 1486 | 1051 | GAAAGGUGUUCAAGUACCA | UGGuAcuuGAAcAccuuucUU | 1058 |
| R-008147454-000S | 734 | 1052 | CCUGUAUCUACUACCUGAA | B ccuGuAucuAcuAccuGAATT B | 1059 |
| R-008147454-000S | 734 | 1052 | CCUGUAUCUACUACCUGAA | UUCAGGuAGuAGAuAcAGGUU | 1060 |

wherein:
A, C, G, and U = ribose A, C, G or U
a, g, c and u = 2′-deoxy-2′-fluoro A, G, C or U
A, U, C and G = 2′-O-methyl (2′-OMe) A, U, C, or G
A, U, C, and G = deoxy A, U, C, or G
B = inverted abasic
T = thymidine
s = phosphorothioate linkage

### Further Synthesis Steps for Commercial Preparation

[0387] Once analysis indicates that the target product purity has been achieved after the annealing step, the material is transferred to the tangential flow filtration (TFF) system for concentration and desalting, as opposed to doing this prior to the annealing step.

[0388] Ultrafiltration: The annealed product solution is concentrated using a TFF system containing an appropriate molecular weight cut-off membrane. Following concentration, the product solution is desalted via diafiltration using Milli-Q water until the conductivity of the filtrate is that of water.

[0389] Lyophilization: The concentrated solution is transferred to a bottle, flash frozen and attached to a lyophilizer. The product is then freeze-dried to a powder. The bottle is removed from the lyophilizer and is now ready for use.

### Initial Screening Protocol (96-Well Plate Transfections)

### Cell Culture Preparation:

[0390] Human hepatoma cell line, HepG2, rhesus kidney epithelial cell line, LLC-MK2 Derivative, Hepa1-6 cells and H-4-II-E cells were grown in modified Eagle's medium. All the culture media were supplemented with 10% fetal bovine serum, 100 μg/mL streptomycin, 100 U/mL penicillin, and 1% sodium bicarbonate.

### Transfection and Screening

[0391] Cells were plated in all wells of tissue-culture treated, 96-well plates at a final count of 3500 (HepG2 and LLC-MK2 Derivative and Hepa1-5) cells/well or 5000 (H-4-II-E) cells/well in 100 μL of the appropriate culture media. The cells were cultured for overnight after plating at 37° C. in the presence of 5% CO₂.

[0392] On the next day, complexes containing siNA and RNAiMax (Invitrogen) were created as follows. A solution of RNAiMax diluted 33-fold in OPTI-MEM was prepared. In parallel, solutions of the siNAs for testing were prepared to a final concentration of 120 nM in OPTI-MEM. After incubation of RNAiMax/OPTI-MEM solution at room temperature for 5 min, an equal volume of the siNA solution and the RNAiMax solution were added together for each of the siNAs.

[0393] Mixing resulted in a solution of siNA/RNAiMax where the concentration of siNA was 60 nM. This solution was incubated at room temperature for 20 minutes. After incubation, 20 μL of the solution was added to each of the relevant wells. The final concentration of siNA in each well was 10 nM and the final volume of RNAiMax in each well was 0.3 ul.

[0394] For 12-point dose response curve studies, a 6-fold serial dilution of the siNA starting at 30 nM was undertaken. All transfections were set up as multiple biological replicates.

[0395] The time of incubation with the RNAiMax-siNA complexes was 24 hours and there was no change in media between transfection and harvesting for screening and dose response curve studies.

### Cells-to-Ct and Reverse Transcription Reactions

[0396] The culture medium was aspirated and discarded from the wells of the culture plates at the desired time points. The transfected cells were washed once with 50 uL DPBS solution per well. Fifty microliters per well of the Lysis Solution from the TaqMan® Gene Expression Cells-to-CT™ Kit (Applied Biosystems, Cat #4399002) supplemented with DNase I was added directly to the plates to lyse the cells. Five microliters per well of Stop Solution from the same kit was added to the plates to inactivate DNase I 5 minutes later. The lysis plates were incubated for at least 2 minutes at room temperature. The plates can be stored for 2 hours at 4° C., or −80° C. for two months.

[0397] Each well of the reverse transcription plate required 10 uL of 2× reverse transcriptase buffer, 1 uL of 20× reverse transcription enzyme and 2 μL of nuclease-free water. The reverse transcription master mix was prepared by mixing 2× reverse transcription buffer, 20× reverse transcription enzyme mix, and nuclease-free water. 13 μL of the reverse transcription master mix was dispensed into each well of the reverse transcription plate (semi-skirted). A separate reverse transcription plate was prepared for each cell plate. A separate reverse transcription plate was prepared for each cell plate. Seven microliters per lysate from the cell lysis procedure described above was added into each well of the reverse transcription plate. The plate was sealed and spun on a centrifuge (1000 rpm for 30 seconds) to settle the contents to the bottom of the reverse transcription plate. The plate was placed in a thermocycler at 37° C. for 60 min, 95° C. for 5 min, and 4° C. until the plate is removed from the thermocycler. Upon removal, if not used immediately, the plate was frozen at −20° C.

### In Vivo

[0398] All experiments were performed in accordance to Institutional American Association for the Accrediation of Laboratory Animal Care guidelines. Balb/C female mice (Charles River) 8-12 weeks of age were administered siNAs by intravenous (i.v.) injection. Animals were euthanized by CO₂ inhalation. Immediately after euthanasia blood was collected via cardiac puncture, unless otherwise indicated. For serum collection, an aliquot of blood was placed in a serum separator tube and allowed to clot at room temperature. Serum was removed and stored at −80° C. until use. Serum EPO was measured using an ELISA (Quantikine, R&D Systems) according to the supplied product protocol. Sections of each liver and kidney were excised and either placed in RNALater and stored at 4° C. until use.

### Quantitative RT-PCR (Taqman)

[0399] A series of probes and primers were used to detect the various mRNA transcripts of the genes of PHD2 and GAPDH. All Taqman probes and primers for the experiments here-in described were supplied as pre-validated sets by Applied Biosystems, Inc. (see Table 2).

TABLE 2
Probes and primers used to carry out Real-Time RT/PCR
(Taqman) reactions for PHD2 mRNA analysis.

| Species | Gene | ABI Cat. # |
|---|---|---|
| Human | PHD2 | Hs00254392_m1 |
| Mouse | PHD2 | Mm00459769_m1 and |
| | | Mm00459770_m1 |
| Human | GAPDH | 4310884E |
| Mouse | GAPDH | 4352339E |

[0400] The assays were performed on an ABI 7900 instrument, according to the manufacturer's instructions. A TaqMan Gene Expression Master Mix (provided in the Cells-to-CT™ Kit, Applied Biosystems, Cat #4399002) was used. The PCR reactions were carried out at 50° C. for 2 min, 95° C. for 10 min followed by 40 cycles at 95° C. for 15 secs and 60° C. for 1 min.

[0401] Within each experiment, the baseline was set in the exponential phase of the amplification curve, and based on the intersection point of the baselines with the amplification curve, a Ct value was assigned by the instrument.

### 5′ RACE Analysis

[0402] The GeneRacer Oligo was ligated to total RNA isolated from the liver by adding 5 μg total RNA, in 7 μl of H₂O, to lyophilised GeneRacer Oligo and incubating at 65 C for 5 minutes. The mixture was placed on ice for 2 minutes, centrifuged briefly, then to it was added 1 μl 10× ligase buffer, 1 μl 10 mM ATP, 1 μl RNAse Out (40 U/μl), and 1 μl T4 RNA ligase (5 U/μl). The mixture was mixed gently, and then incubated at 37 C for 1 hour. Following 1 hour incubation, 90 μl DEPC H₂O and 100 μl phenol:cholorform was added. The mixture was vortexed on high for 30 seconds then centrifuged 5 minutes on high. The aqueous layer was transferred to a new eppendorf tube. To this layer was added 2 μl glycogen, 10 μl 3M sodium acetate and then mixed. 220 μl of ethanol was then added. The mixture was inverted several times to mix then placed on dry ice for 10 minutes. It was centrifuge on high at 4 C for 20 minutes. The supernatant was aspirated then wash with 70% ethanol. It was centrifuged for 5 minutes on high and the supernatant was removed. The pellet was allowed to dry for 2-3 minutes. The pellet was suspended in 10 μl of DEPC H₂O.

[0403] To 10 μl of the ligated RNA was added 1 μl 10 μM RT-Primer (ENaCα primer 1), 1 μl 10 mM dNTP mix, and 1 μl DEPC H₂O then the mixture was incubated at 65 C for 5 minutes, followed by placing on ice for 2 minutes, and centrifuging briefly To this was added 4 μl 5× first strand buffer, 1 μl 0.1M DTT, 1 μl RNAse Out (40 U/μl), and 1 μl Superscript III RT (200 U/μl). The mixture was mixed gently then incubated at 50 C for 45 minutes followed by 65 C for 7 minutes. The RT reaction was inactivated by incubating at 70 C for 15 minute and then placing on ice. The mixture was centrifuged briefly. To it was then added 1 μl RNAse H (2 U) followed by mixing gently and then incubating at 37 C for 20 minutes. This mixture was then either stored at −20 C or used immediately for PCR.

[0404] Using 1 μl of the RT reaction above as template, a standard PCR amplification was performed for 34 cycles using 5′ GeneRacer primer and 3′ Gene Specific primer (ENaCα primer 1). The specificity was increased by use of a 60 C annealing temperature. Using 1 μl of the PCR reaction above as template, a Nested PCR was performed reaction for 34 cycles using the GeneRacer Nested 5′ primer and Nested 3′ Gene Specific primers (ENaCα primer 2). The specificity was increased by use of a 60 C annealing temperature. The samples were analyzed on native 6% PAGE. The bands of expected size were cut out and eluted from gel using SNAP columns provided with the GeneRacer kit. The eluted gel bands were cloned using a TOPO TA Cloning kit provided with the GeneRacer kit. LB-Amp agar plates containing colonies were PCR screened and sequenced.

TABLE 3
Primer sequences used in RACE method

| | | SEQ ID |
|---|---|---|
| PRIMER | SEQUENCE | NO: |
| GeneRacer 5′ Primer | 5′-CGACTGGAGCACGAGGACACTGA | 1065 |
| GeneRacer 5′ Nested Primer | 5′-GGACACTGACATGGACTGAAGGAGTA | 1066 |
| Gene specific primer 1 | 5′-GGCAAAATAGAAGACT | 1067 |
| Gene specific primer 2 | 5′-CCTCCGACAGCGTCTCCTCTT | 1068 |
| Forward primer 1 | 5′-ACATCGTGCCGTGCATGAACAAGC | 1069 |
| Forward primer 2 | 5′-CAAATGGAGATGGAAGATGCGTGAC | 1070 |

### Calculations

[0405] The expression level of the gene of interest and % inhibition of gene expression (% KD) was calculated using a Comparative Ct method:

$$\begin{matrix}Δ Ct = {Ct}_{Target} - {Ct}_{GAPDH} \\ ΔΔ Ct ( log 2 ( fold change ) ) = Δ {Ct}_{( Target siNA )} - Δ {Ct}_{( NTC )} \\ Relative expression level = {2}^{- ΔΔ Ct} \\ \% KD = 100 \times ( 1 - {2}^{- ΔΔ Ct} )\end{matrix}$$

[0406] The non-targeting control siNA was, unless otherwise indicated, chosen as the value against which to calculate the percent inhibition (knockdown) of gene expression, because it is the most relevant control.

[0407] Additionally, only normalized data, which reflects the general health of the cell and quality of the RNA extraction, was examined. This was done by looking at the level of two different mRNAs in the treated cells, the first being the target mRNA and the second being the normalizer mRNA. This allowed for elimination of siNAs that might be potentially toxic to cells rather than solely knocking down the gene of interest. This was done by comparing the Ct for GAPDH in each well relative to the GAPDH Ct for the entire plate.

[0408] All calculations of IC₅₀s were determined using R or Sigmaplot software or a standard sigmoidal dose response curve fit. The data were analyzed using the sigmoidal dose-response (variable slope) equation for simple ligand binding. In all of the calculations of the percent inhibition (knock-down), the calculation was made relative to the normalized level of expression of the gene of interest in the samples treated with the non-targeting control (Ctrl siNA) unless otherwise indicated.

### Results:

[0409] The PHD2 siNAs were designed and synthesized as described previously. Various siNAs homologous to human PHD2 were screened in HepG2, MK2D, Hepa1-6 and H42E cells. The log 2(fold change) (also denoted as ΔΔCt) in PHD2 gene expression data upon treatment with various modified PHD2 siNAs in human cells, mouse and/or rat cells is shown in Table 4a. Each screen was performed at 24 hrs. Quantitative RT-PCR was used to assess the level of PHD2 mRNA and the data were normalized to the expression level of GAPDH (an ubiquitously expressed ‘house-keeping’ gene). Each treatment was then normalized against the non-PHD2 targeting control.

TABLE 4a
Mean log 2 (fold change)) in PHD2 gene expression from
primary screening in human, mouse and rat cell lines
of target sequences that are homologous to human PHD2

| | Mean ΔΔCt | Mean ΔΔCt | Mean ΔΔCt |
|---|---|---|---|
| siNA Duplex ID | human | mouse | rat |
| R-008350764-000X | 4.646 | | |
| R-008242746-000B | 4.594 | −0.091 | 1.503 |
| R-008350777-000R | 4.516 | | |
| R-008350805-000L | 4.406 | | |
| R-008350656-000M | 4.389 | | |
| R-008242866-000W | 4.353 | 0.835 | −0.035 |
| R-008358086-000M | 4.299 | | |
| R-008242920-000J | 4.266 | 2.117 | 1.546 |
| R-008242851-000K | 4.251 | 4.903 | 2.622 |
| R-008242962-000W | 4.229 | −0.281 | −0.427 |
| R-008358031-000G | 4.226 | | |
| R-008350662-000V | 4.194 | | |
| R-008350773-000F | 4.113 | | |
| R-008350778-000Z | 4.100 | | |
| R-008242878-000F | 4.098 | 4.299 | 2.44 |
| R-008358043-000S | 4.085 | | |
| R-008242980-000N | 4.069 | 3.431 | 2.796 |
| R-008350321-000M | 4.037 | | |
| R-008242923-000K | 4.035 | 3.247 | 2.979 |
| R-008242914-000B | 4.011 | −0.079 | 1.009 |
| R-008350707-000U | 3.981 | | |
| R-008350784-000G | 3.975 | | |
| R-008350681-000W | 3.968 | | |
| R-008358084-000V | 3.95 | | |
| R-008350667-000N | 3.937 | | |
| R-008242938-000W | 3.909 | 3.082 | 2.946 |
| R-008358079-000W | 3.882 | | |
| R-008350807-000D | 3.877 | | |
| R-008350323-000E | 3.865 | | |
| R-008242956-000N | 3.864 | 3.747 | 2.563 |
| R-008350766-000P | 3.857 | | |
| R-008242953-000M | 3.845 | 4.441 | 2.739 |
| R-008242797-000X | 3.844 | 4.777 | 3.489 |
| R-008350328-000Y | 3.819 | | |
| R-008350806-000V | 3.819 | | |
| R-008358087-000W | 3.773 | | |
| R-008350751-000D | 3.77 | | |
| R-008350768-000G | 3.759 | | |
| R-008358085-000D | 3.755 | | |
| R-008350771-000N | 3.745 | | |
| R-008350797-000A | 3.731 | | |
| R-008350657-000W | 3.719 | | |
| R-008350608-000T | 3.707 | | |
| R-008350748-000X | 3.704 | | |
| R-008242815-000A | 3.678 | 3.683 | 0.169 |
| R-008350779-000H | 3.662 | | |
| R-008350691-000N | 3.645 | | |
| R-008350331-000E | 3.644 | | |
| R-008350762-000E | 3.637 | | |
| R-008350737-000W | 3.629 | | |
| R-008358071-000B | 3.623 | | |
| R-008350794-000Z | 3.619 | | |
| R-008350789-000A | 3.616 | | |
| R-008242965-000X | 3.611 | −0.015 | −0.169 |
| R-008358036-000A | 3.594 | | |
| R-008350586-000E | 3.561 | | |
| R-008358075-000L | 3.557 | | |
| R-008350750-000V | 3.555 | | |
| R-008350740-000C | 3.551 | | |
| R-008350694-000P | 3.546 | | |
| R-008358046-000T | 3.526 | | |
| R-008358094-000M | 3.526 | | |
| R-008350759-000Y | 3.522 | | |
| R-008358007-000G | 3.503 | | |
| R-008358078-000M | 3.500 | | |
| R-008350624-000T | 3.499 | | |
| R-008358048-000K | 3.499 | | |
| R-008350729-000W | 3.496 | | |
| R-008350693-000F | 3.49 | | |
| R-008358068-000V | 3.486 | | |
| R-008350699-000H | 3.477 | | |
| R-008350732-000C | 3.474 | | |
| R-008358089-000N | 3.473 | | |
| R-008350770-000E | 3.435 | | |
| R-008358064-000K | 3.413 | | |
| R-008350725-000L | 3.408 | | |
| R-008357995-000P | 3.389 | | |
| R-008350654-000V | 3.379 | | |
| R-008350718-000V | 3.377 | | |
| R-008242809-000T | 3.373 | −0.056 | −0.805 |
| R-008358067-000L | 3.373 | | |
| R-008350334-000F | 3.364 | | |
| R-008357994-000F | 3.359 | | |
| R-008350743-000D | 3.356 | | |
| R-008242983-000P | 3.351 | 3.461 | 3.205 |
| R-008293560-000E | 3.35 | | |
| R-008242785-000M | 3.344 | 0.017 | −0.064 |
| R-008350799-000T | 3.341 | | |
| R-008350721-000B | 3.34 | | |
| R-008350733-000L | 3.33 | | |
| R-008242740-000Z | 3.327 | −0.037 | −0.154 |
| R-008358088-000E | 3.312 | | |
| R-008358004-000F | 3.307 | | |
| R-008358050-000H | 3.303 | | |
| R-008291303-000T | 3.294 | | |
| R-008293562-000X | 3.292 | | |
| R-008350760-000M | 3.292 | | |
| R-008358061-000J | 3.292 | | |
| R-008358015-000G | 3.29 | | |
| R-008291307-000C | 3.285 | | |
| R-008350765-000F | 3.285 | | |
| R-008350774-000P | 3.279 | | |
| R-008350648-000M | 3.276 | | |
| R-008293573-000Y | 3.26 | | |
| R-008293571-000F | 3.257 | | |
| R-008357991-000E | 3.25 | | |
| R-008350634-000K | 3.247 | | |
| R-008293542-000M | 3.245 | | |
| R-008358038-000T | 3.234 | | |
| R-008053255-001R | 3.223 | | −0.5 |
| R-008242752-000J | 3.217 | 2.85 | 3.073 |
| R-008293548-000P | 3.215 | | |
| R-008350769-000R | 3.215 | | |
| R-008053262-001G | 3.21 | | 1.937 |
| R-008242974-000F | 3.199 | 3.443 | 2.73 |
| R-008358080-000K | 3.191 | | |
| R-008350620-000H | 3.179 | | |
| R-008358002-000N | 3.15 | | |
| R-008358093-000D | 3.15 | | |
| R-008293570-000X | 3.144 | | |
| R-008293546-000X | 3.133 | | |
| R-008293568-000Z | 3.121 | | |
| R-008350583-000D | 3.119 | | |
| R-008350622-000A | 3.113 | | |
| R-008039847-001N | 3.054 | | 0.487 |
| R-008293588-000J | 3.044 | | |
| R-008292823-000W | 3.041 | | |
| R-008358073-000U | 3.028 | | |
| R-008293563-000F | 3.02 | | |
| R-008350649-000W | 3.017 | | |
| R-008292771-000F | 3.005 | | |
| R-008292813-000D | 2.998 | | |
| R-008053276-001J | 2.988 | | 1.685 |
| R-008292765-000Y | 2.988 | | |
| R-008350661-000L | 2.984 | | |
| R-008242950-000L | 2.983 | 4.362 | 2.664 |
| R-008358057-000U | 2.973 | | |
| R-008358063-000B | 2.965 | | |
| R-008292777-000H | 2.963 | | |
| R-008293557-000Y | 2.96 | | |
| R-008350763-000N | 2.96 | | |
| R-008293553-000N | 2.938 | | |
| R-008242887-000P | 2.927 | −0.041 | −0.067 |
| R-008358055-000B | 2.925 | | |
| R-008358090-000C | 2.903 | | |
| R-008242893-000X | 2.898 | 2.88 | 0.321 |
| R-008292807-000W | 2.889 | | |
| R-008293582-000G | 2.872 | | |
| R-008350285-000S | 2.87 | | |
| R-008350782-000P | 2.858 | | |
| R-008293590-000G | 2.857 | | |
| R-008293580-000P | 2.849 | | |
| R-008292827-000F | 2.844 | | |
| R-008350685-000F | 2.837 | | |
| R-008242881-000M | 2.835 | 3.829 | 2.349 |
| R-008053225-001N | 2.834 | | −1.034 |
| R-008357989-000G | 2.831 | | |
| R-008242917-000C | 2.83 | 3.358 | 2.756 |
| R-008293544-000E | 2.803 | | |
| R-008039846-001E | 2.798 | 6.958 | 2.261 |
| R-008293564-000P | 2.789 | | |
| R-008293591-000R | 2.785 | | |
| R-008293584-000Z | 2.773 | | |
| R-008292809-000N | 2.767 | | |
| R-008292785-000H | 2.761 | | |
| R-008358091-000L | 2.761 | | |
| R-008242830-000S | 2.749 | 3.466 | 2.378 |
| R-008293556-000P | 2.748 | | |
| R-008358023-000G | 2.739 | | |
| R-008292787-000A | 2.736 | | |
| R-008053260-001P | 2.733 | | 0.26 |
| R-008242836-000U | 2.728 | 4.784 | 3.716 |
| R-008358083-000L | 2.725 | | |
| R-008242941-000C | 2.711 | 2.824 | 3.979 |
| R-008350791-000Y | 2.71 | | |
| R-008292817-000N | 2.708 | | |
| R-008358060-000A | 2.705 | | |
| R-008292805-000D | 2.702 | | |
| R-008350609-000B | 2.698 | | |
| R-008242857-000M | 2.686 | 0.092 | −0.042 |
| R-008350610-000R | 2.686 | | |
| R-008292767-000R | 2.675 | | |
| R-008293576-000Z | 2.666 | | |
| R-008350326-000F | 2.664 | | |
| R-008242773-000C | 2.662 | −0.325 | −0.151 |
| R-008350746-000E | 2.647 | | |
| R-008053257-001H | 2.637 | | −0.974 |
| R-008358052-000A | 2.632 | | |
| R-008242911-000A | 2.617 | 2.967 | −2.946 |
| R-008350776-000G | 2.616 | | |
| R-008053204-001V | 2.613 | | 3.109 |
| R-008350790-000P | 2.606 | | |
| R-008350801-000B | 2.58 | | |
| R-008053275-001A | 2.565 | | 2.977 |
| R-008053203-001L | 2.551 | | −0.12 |
| R-008292783-000R | 2.549 | | |
| R-008350755-000N | 2.549 | | |
| R-008292797-000T | 2.545 | | |
| R-008358012-000F | 2.545 | | |
| R-008053233-001N | 2.538 | | 1.848 |
| R-008292821-000D | 2.537 | | |
| R-008292793-000H | 2.536 | | |
| R-008293559-000R | 2.525 | | |
| R-008358026-000H | 2.521 | | |
| R-008293589-000T | 2.5 | | |
| R-008293577-000H | 2.497 | | |
| R-008358020-000F | 2.493 | | |
| R-008350288-000T | 2.476 | | |
| R-008053249-001H | 2.465 | | 1.15 |
| R-008293561-000N | 2.461 | | |
| R-008053226-001X | 2.46 | | 0.933 |
| R-008053205-001D | 2.445 | | 0.97 |
| R-008242794-000W | 2.443 | −0.133 | −0.223 |
| R-008350653-000L | 2.433 | | |
| R-008292795-000A | 2.417 | | |
| R-008053208-001E | 2.41 | | 2.441 |
| R-008242803-000R | 2.399 | 2.967 | 2.286 |
| R-008293555-000F | 2.394 | | |
| R-008358027-000S | 2.392 | | |
| R-008242779-000E | 2.376 | 1.998 | 1.223 |
| R-008293583-000R | 2.371 | | |
| R-008350741-000L | 2.367 | | |
| R-008039848-001X | 2.364 | 3.74 | 1.554 |
| R-008350787-000H | 2.364 | | |
| R-008053238-001G | 2.352 | | 2.093 |
| R-008053242-001X | 2.352 | | 1.98 |
| R-008358022-000Y | 2.351 | | |
| R-008242947-000E | 2.338 | 3.92 | 0.935 |
| R-008242761-000T | 2.328 | 2.1 | 0.994 |
| R-008292801-000U | 2.325 | | |
| R-008053246-001G | 2.316 | | 1.58 |
| R-008358070-000T | 2.312 | | |
| R-008350745-000W | 2.311 | | |
| R-008358018-000H | 2.305 | | |
| R-008242734-000S | 2.295 | 3.292 | 2.83 |
| R-008293578-000S | 2.292 | | |
| R-008293586-000S | 2.279 | | |
| R-008242908-000U | 2.269 | −0.103 | −0.021 |
| R-008350767-000Y | 2.261 | | |
| R-008242884-000N | 2.223 | 2.33 | 1.54 |
| R-008242944-000D | 2.2 | 0.77 | 1.161 |
| R-008053216-001E | 2.196 | | 0.67 |
| R-008350713-000B | 2.188 | | |
| R-008242929-000M | 2.171 | 2.144 | 3.125 |
| R-008350798-000J | 2.171 | | |
| R-008053218-001X | 2.165 | | 2.156 |
| R-008242821-000H | 2.163 | 0.763 | 1.922 |
| R-008350690-000E | 2.103 | | |
| R-008291295-000G | 2.097 | | |
| R-008053222-001M | 2.096 | | 0.229 |
| R-008291276-000F | 2.086 | | |
| R-008358081-000U | 2.084 | | |
| R-008242863-000V | 2.08 | 2.765 | 1.002 |
| R-008358092-000V | 2.045 | | |
| R-008053215-001W | 2.021 | | 1.883 |
| R-008293579-000A | 2.02 | | |
| R-008291305-000K | 2.018 | | |
| R-008242860-000U | 2.007 | 0.439 | 0.605 |
| R-008242839-000V | 1.999 | −0.33 | −0.539 |
| R-008053270-001G | 1.995 | | 2.065 |
| R-008293552-000E | 1.974 | | |
| R-008053206-001M | 1.971 | | 0.644 |
| R-008291293-000P | 1.966 | | |
| R-008242743-000A | 1.957 | 1.631 | −0.016 |
| R-008242899-000Z | 1.955 | 0.161 | 0.021 |
| R-008350783-000Y | 1.947 | | |
| R-008350736-000M | 1.946 | | |
| R-008350703-000J | 1.933 | | |
| R-008357997-000G | 1.927 | | |
| R-008291279-000G | 1.914 | | |
| R-008053258-001S | 1.908 | | 1.16 |
| R-008039882-001P | 1.907 | | 2.093 |
| R-008053217-001N | 1.898 | | 0.233 |
| R-008293550-000M | 1.892 | | |
| R-008053274-001S | 1.886 | | 0.685 |
| R-008053259-001A | 1.879 | | 1.664 |
| R-008242935-000V | 1.86 | 0.561 | 1.848 |
| R-008293587-000A | 1.858 | | |
| R-008293575-000R | 1.854 | | |
| R-008293566-000G | 1.826 | | |
| R-008053220-001V | 1.794 | | 1.223 |
| R-008242971-000E | 1.79 | −0.082 | −0.757 |
| R-008242959-000P | 1.789 | 0.113 | 0.509 |
| R-008242902-000S | 1.778 | 0.714 | 0.782 |
| R-008291285-000P | 1.773 | | |
| R-008053250-001X | 1.772 | | 2.556 |
| R-008053245-001Y | 1.751 | | 0.458 |
| R-008053235-001F | 1.748 | | −0.557 |
| R-008293569-000H | 1.745 | | |
| R-008053209-001N | 1.696 | | 1.897 |
| R-008350747-000N | 1.689 | | |
| R-008350739-000N | 1.66 | | |
| R-008039849-001F | 1.65 | 4.09 | 2.503 |
| R-008242845-000C | 1.649 | 0.115 | 3.143 |
| R-008358042-000H | 1.648 | | |
| R-008053265-001H | 1.644 | | 2.142 |
| R-008053207-001W | 1.633 | | 3.848 |
| R-008053219-001F | 1.625 | | 0.816 |
| R-008053269-001T | 1.625 | | 2.248 |
| R-008242767-000V | 1.615 | 2.195 | 1.674 |
| R-008292803-000L | 1.613 | | |
| R-008358041-000Z | 1.599 | | |
| R-008358069-000D | 1.596 | | |
| R-008350652-000C | 1.592 | | |
| R-008242890-000W | 1.565 | 1.638 | 0.54 |
| R-008358082-000C | 1.552 | | |
| R-008350318-000F | 1.548 | | |
| R-008350752-000M | 1.537 | | |
| R-008242905-000T | 1.53 | 0.01 | 0.337 |
| R-008242776-000D | 1.519 | −0.069 | −0.227 |
| R-008053240-001E | 1.489 | | −1.032 |
| R-008358000-000W | 1.477 | | |
| R-008053211-001L | 1.469 | | −1.058 |
| R-008350310-000L | 1.447 | | |
| R-008053263-001R | 1.443 | | 1.311 |
| R-008350754-000E | 1.407 | | |
| R-008053256-001Z | 1.393 | | 0.481 |
| R-008350673-000W | 1.373 | | |
| R-008242875-000E | 1.341 | 0.206 | 0.29 |
| R-008350795-000H | 1.322 | | |
| R-008350803-000U | 1.314 | | |
| R-008053200-001K | 1.313 | | 1.551 |
| R-008053214-001M | 1.306 | | 1.498 |
| R-008053224-001E | 1.306 | | −1.233 |
| R-008242869-000X | 1.281 | 1.38 | 0.581 |
| R-008053230-001M | 1.269 | | 0.215 |
| R-008053227-001F | 1.268 | | 0.828 |
| R-008053267-001A | 1.25 | | 2.459 |
| R-008350780-000X | 1.247 | | |
| R-008358035-000S | 1.232 | | |
| R-008350757-000F | 1.184 | | |
| R-008242968-000Y | 1.176 | 1.163 | 1.358 |
| R-008053268-001J | 1.162 | | 0.908 |
| R-008242755-000K | 1.127 | 0.552 | 0.083 |
| R-008053212-001V | 1.118 | | −0.402 |
| R-008350671-000D | 1.116 | | |
| R-008053202-001C | 1.106 | | −0.088 |
| R-008350290-000R | 1.099 | | |
| R-008053277-001T | 1.082 | | 0.913 |
| R-008350313-000M | 1.077 | | |
| R-008358049-000U | 1.077 | | |
| R-008291300-000S | 1.076 | | |
| R-008358065-000U | 1.049 | | |
| R-008350756-000X | 1.033 | | |
| R-008053243-001F | 1.028 | | −0.342 |
| R-008242872-000D | 1.023 | 2.566 | 2.03 |
| R-008358040-000R | 0.951 | | |
| R-008350785-000R | 0.936 | | |
| R-008242833-000T | 0.934 | −0.096 | −0.355 |
| R-008053213-001D | 0.907 | | −1.091 |
| R-008291298-000H | 0.899 | | |
| R-008242764-000U | 0.83 | −0.273 | −0.374 |
| R-008293565-000Y | 0.819 | | |
| R-008292761-000N | 0.781 | | |
| R-008350781-000F | 0.769 | | |
| R-008242770-000B | 0.761 | 2.488 | 0.038 |
| R-008053244-001P | 0.759 | | −1.057 |
| R-008242788-000N | 0.759 | 1.516 | −0.607 |
| R-008291290-000N | 0.734 | | |
| R-008242806-000S | 0.725 | 0.603 | 0.85 |
| R-008350802-000K | 0.716 | | |
| R-008292769-000H | 0.681 | | |
| R-008292825-000N | 0.642 | | |
| R-008292811-000E | 0.625 | | |
| R-008292819-000F | 0.62 | | |
| R-008358033-000Z | 0.613 | | |
| R-008291309-000V | 0.591 | | |
| R-008053221-001D | 0.582 | | −0.232 |
| R-008350738-000E | 0.581 | | |
| R-008292791-000R | 0.557 | | |
| R-008292815-000W | 0.55 | | |
| R-008242854-000L | 0.536 | 2.545 | 0.668 |
| R-008053272-001Z | 0.523 | | 1.641 |
| R-008242977-000G | 0.501 | 0.023 | −0.087 |
| R-008358058-000C | 0.479 | | |
| R-008242812-000Z | 0.441 | 2.199 | −0.071 |
| R-008053247-001R | 0.396 | | −0.876 |
| R-008358009-000Z | 0.38 | | |
| R-008053201-001U | 0.315 | | −0.377 |
| R-008242818-000B | 0.307 | −0.08 | −0.134 |
| R-008350800-000T | 0.305 | | |
| R-008242926-000L | 0.295 | 0.127 | 0.013 |
| R-008053264-001Z | 0.288 | | 0.248 |
| R-008358059-000L | 0.259 | | |
| R-008053223-001W | 0.237 | | −1.368 |
| R-008242782-000L | 0.235 | 0.035 | −0.502 |
| R-008242800-000P | 0.233 | −0.079 | −0.268 |
| R-008242791-000V | 0.222 | 0.038 | 0.575 |
| R-008242758-000L | 0.219 | 0.151 | −0.297 |
| R-008292775-000R | 0.21 | | |
| R-008242749-000C | 0.178 | −0.11 | 0.258 |
| R-008242896-000Y | 0.173 | 0.546 | −0.037 |
| R-008358029-000J | 0.156 | | |
| R-008242827-000K | 0.121 | 0.007 | −0.908 |
| R-008053253-001Y | 0.116 | | 0.285 |
| R-008242848-000D | 0.116 | −0.012 | 0.644 |
| R-008242932-000U | 0.082 | 0.484 | 4.53 |
| R-008053248-001Z | 0.078 | | −0.577 |
| R-008053237-001Y | 0.066 | | −1.232 |
| R-008350786-000Z | 0.044 | | |
| R-008053232-001E | 0.032 | | −0.625 |
| R-008053261-001Y | 0.018 | | 1.705 |
| R-008242824-000J | −0.046 | 0.135 | 0.14 |
| R-008242737-000T | −0.065 | −0.102 | 0.686 |
| R-008053273-001H | −0.068 | | 0.368 |
| R-008350677-000F | −0.081 | | |
| R-008053210-001C | −0.108 | | −0.568 |
| R-008053241-001N | −0.129 | | 0.888 |
| R-008053234-001X | −0.142 | | −0.917 |
| R-008053239-001R | −0.152 | | −0.238 |
| R-008053266-001S | −0.253 | | −0.433 |
| R-008100897-000H | −0.293 | | 0.245 |
| R-008053271-001R | −0.315 | | 0.966 |
| R-008053228-001P | −0.317 | | 0.162 |
| R-008053231-001W | −0.337 | | 0.477 |
| R-008053229-001Y | −0.434 | | 0.005 |
| R-008053252-001P | −0.529 | | 0.637 |
| R-008350666-000E | −0.544 | | |
| R-008242842-000B | −0.773 | 0.018 | −0.587 |
| R-008053236-001P | −1.051 | | −1.001 |
| R-008053254-001G | −1.135 | | 0.004 |
| R-008053251-001F | −1.402 | | 0.125 |
| R-008074446-000X | | | |
| R-008114774-000E | | | 0.051 |
| R-008313812-000E | | 1.695 | |
| R-008313815-000F | | 3.812 | |
| R-008313818-000G | | 4.3 | |
| R-008313824-000P | | 4.204 | |
| R-008313829-000H | | 4.561 | |
| R-008313839-000A | | 3.899 | |
| R-008313842-000G | | 3.958 | |
| R-008313845-000H | | 3.568 | |
| R-008313848-000J | | 4.333 | |
| R-008313862-000S | | 3.749 | |
| R-008313869-000C | | 3.907 | |
| R-008313872-000J | | 3.927 | |
| R-008313875-000K | | 1.54 | |
| R-008313877-000C | | 2.724 | |
| R-008313879-000V | | 4.19 | |
| R-008313883-000K | | 4.446 | |
| R-008321381-000U | | 4.288 | |
| R-008321383-000L | | 0.73 | |
| R-008321386-000M | | 3.496 | |
| R-008321388-000E | | 1.693 | |
| R-008321397-000N | | 5.67 | |
| R-008321398-000X | | 4.404 | |
| R-008321400-000F | | 0.341 | |
| R-008321416-000A | | 5.758 | |
| R-008321423-000S | | 1.289 | |
| R-008321425-000J | | 0.364 | |
| R-008321436-000K | | 6.261 | |
| R-008321438-000C | | 5.262 | |
| R-008321439-000L | | 4.729 | |
| R-008321440-000A | | 2.74 | |
| R-008321442-000T | | 1.147 | |
| R-008321444-000K | | 2.853 | |
| R-008321445-000U | | 3.873 | |
| R-008321447-000L | | 4.009 | |
| R-008321448-000V | | 3.075 | |
| R-008321449-000D | | 3.761 | |
| R-008321455-000L | | 5.41 | |
| R-008321456-000V | | 1.601 | |
| R-008321458-000M | | 4.117 | |
| R-008321459-000W | | 3.502 | |
| R-008321465-000D | | 7.918 | |
| R-008321466-000M | | 4.996 | |
| R-008321467-000W | | 2.222 | |
| R-008321469-000N | | 0.005 | |
| R-008321470-000C | | 3.44 | |
| R-008321472-000V | | 1.539 | |
| R-008321489-000Y | | 8.099 | |
| R-008321492-000E | | 4.877 | |
| R-008321495-000F | | 3.379 | |
| R-008321498-000G | | 3.000 | |
| R-008321502-000H | | 0.353 | |
| R-008321506-000T | | 3.422 | |
| R-008321509-000U | | 4.216 | |
| R-008321511-000S | | 0.612 | |

[0410] A subset of siNAs from Table 4a having human and/or human and rhesus monkey homology were rescreened in HepG2 cells. The results are shown in Table 4b.

TABLE 4b
Primary screening data in HepG2 Cells (n = 2),
recorded as log 2(fold change) in PHD2 gene expression.

| siNA Duplex ID | Mean ΔΔCt | SD ΔΔCt |
|---|---|---|
| R-008242953-000M | 4.375294958 | 0.096341 |
| R-008242851-000K | 4.316106958 | 0.012034 |
| R-008242746-000B | 4.270069458 | 0.015912 |
| R-008242920-000J | 4.251771708 | 0.035706 |
| R-008242962-000W | 4.165476208 | 0.052659 |
| R-008242923-000K | 4.041618958 | 0.093791 |
| R-008242866-000W | 4.011436708 | 0.20058 |
| R-008242878-000F | 4.011261958 | 0.420703 |
| R-008242914-000B | 3.992852958 | 0.13197 |
| R-008242980-000N | 3.936987958 | 0.353712 |
| R-008242809-000T | 3.879636458 | 0.011522 |
| R-008242956-000N | 3.875320208 | 0.043978 |
| R-008242974-000F | 3.864337208 | 0.353068 |
| R-008242797-000X | 3.839582958 | 0.139778 |
| R-008242938-000W | 3.839333708 | 0.260917 |
| R-008242815-000A | 3.728742958 | 0.256476 |
| R-008242965-000X | 3.638300958 | 0.108311 |
| R-008242950-000L | 3.404739458 | 0.185478 |
| R-008053225-001N | 3.356042875 | 0.050871 |
| R-008242752-000J | 3.169838208 | 0.185568 |
| R-008053262-001G | 3.148865875 | 0.092372 |
| R-008242803-000R | 3.118006458 | 0.033117 |
| R-008242893-000X | 3.107529208 | 0.216893 |
| R-008242983-000P | 3.106440958 | 0.594187 |
| R-008242881-000M | 3.078128708 | 0.03661 |
| R-008053260-001P | 3.001020875 | 0.280539 |
| R-008242911-000A | 3.000571708 | 0.318624 |
| R-008242836-000U | 2.999742208 | 0.262563 |
| R-008053255-001R | 2.984945875 | 0.203558 |
| R-008242785-000M | 2.967740958 | 0.394848 |
| R-008242917-000C | 2.957716708 | 0.213281 |
| R-008242941-000C | 2.956891708 | 0.132434 |
| R-008053208-001E | 2.948068375 | 0.238096 |
| R-008053276-001J | 2.947308375 | 0.139665 |
| R-008242857-000M | 2.885071958 | 0.02595 |
| R-008053233-001N | 2.884351625 | 0.37107 |
| R-008053203-001L | 2.878281375 | 0.216498 |
| R-008242830-000S | 2.821544958 | 0.082372 |
| R-008053205-001D | 2.809057125 | 0.087877 |
| R-008053270-001G | 2.800851625 | 0.2197 |
| R-008053238-001G | 2.786147625 | 0.008956 |
| R-008242887-000P | 2.774489458 | 0.212079 |
| R-008053242-001X | 2.772854375 | 0.600088 |
| R-008242740-000Z | 2.754767208 | 0.632536 |
| R-008053204-001V | 2.746108375 | 0.133034 |
| R-008242761-000T | 2.745309958 | 0.049023 |
| R-008242947-000E | 2.695491458 | 0.146771 |
| R-008242734-000S | 2.678454458 | 0.287616 |
| R-008242779-000E | 2.588540958 | 0.18558 |
| R-008242794-000W | 2.568311458 | 0.198667 |
| R-008039847-001N | 2.526516625 | 0.073003 |
| R-008242929-000M | 2.525710958 | 0.066227 |
| R-008053226-001X | 2.525339875 | 0.108203 |
| R-008039846-001E | 2.519394125 | 0.684137 |
| R-008053275-001A | 2.516803375 | 0.2294 |
| R-008053257-001H | 2.510006375 | 0.220569 |
| R-008242773-000C | 2.478195458 | 0.066489 |
| R-008053220-001V | 2.476915375 | 0.116919 |
| R-008039882-001P | 2.448826875 | 0.136691 |
| R-008242767-000V | 2.448566708 | 0.269264 |
| R-008053274-001S | 2.447922375 | 0.095463 |
| R-008242935-000V | 2.426307708 | 0.236549 |
| R-008053243-001F | 2.398665125 | 2.967525 |
| R-008053246-001G | 2.385366875 | 0.032002 |
| R-008242899-000Z | 2.324255958 | 0.131337 |
| R-008242743-000A | 2.316400708 | 0.087061 |
| R-008039848-001X | 2.300131625 | 0.487628 |
| R-008053212-001V | 2.183780875 | 1.977418 |
| R-008053215-001W | 2.178482625 | 0.093503 |
| R-008053258-001S | 2.177955375 | 0.051328 |
| R-008242863-000V | 2.163817708 | 0.079544 |
| R-008242959-000P | 2.155715208 | 0.132289 |
| R-008053265-001H | 2.148840375 | 0.133067 |
| R-008039849-001F | 2.144277875 | 0.173487 |
| R-008053206-001M | 2.133840375 | 0.336819 |
| R-008242860-000U | 2.131762458 | 0.019656 |
| R-008053216-001E | 2.121260375 | 0.233191 |
| R-008053209-001N | 2.120463625 | 0.157879 |
| R-008242884-000N | 2.115908458 | 0.044739 |
| R-008053222-001M | 2.065921625 | 0.240167 |
| R-008242944-000D | 2.062746708 | 0.040076 |
| R-008053218-001X | 1.996233125 | 0.07761 |
| R-008053217-001N | 1.983270375 | 0.10962 |
| R-008242902-000S | 1.957863708 | 0.039072 |
| R-008242821-000H | 1.954029458 | 0.712711 |
| R-008053219-001F | 1.928271875 | 0.045043 |
| R-008053200-001K | 1.928155875 | 0.243299 |
| R-008242908-000U | 1.916232208 | 0.075726 |
| R-008053267-001A | 1.908328875 | 0.005013 |
| R-008242869-000X | 1.908020208 | 0.21855 |
| R-008242776-000D | 1.896053958 | 0.082994 |
| R-008053263-001R | 1.890618875 | 0.239332 |
| R-008242890-000W | 1.825492708 | 0.118741 |
| R-008242839-000V | 1.807725208 | 0.10962 |
| R-008053235-001F | 1.756261625 | 0.105645 |
| R-008053207-001W | 1.658139875 | 0.219908 |
| R-008053214-001M | 1.638638125 | 0.152989 |
| R-008053240-001E | 1.634160375 | 0.048608 |
| R-008053250-001X | 1.589014375 | 0.689289 |
| R-008053269-001T | 1.538799875 | 0.064089 |
| R-008242872-000D | 1.522285708 | 0.024543 |
| R-008053227-001F | 1.494650375 | 0.009985 |
| R-008053245-001Y | 1.481570875 | 0.237585 |
| R-008053224-001E | 1.465118125 | 0.038311 |
| R-008053230-001M | 1.449938625 | 0.143134 |
| R-008242968-000Y | 1.445687708 | 0.133541 |
| R-008242845-000C | 1.367837458 | 0.030156 |
| R-008242971-000E | 1.354596208 | 0.169739 |
| R-008053202-001C | 1.343233625 | 0.023101 |
| R-008242905-000T | 1.311438708 | 0.142388 |
| R-008242788-000N | 1.290069208 | 0.149088 |
| R-008053256-001Z | 1.286685375 | 0.025879 |
| R-008242764-000U | 1.273648708 | 0.012243 |
| R-008053211-001L | 1.212632875 | 0.165558 |
| R-008242854-000L | 1.117331208 | 0.234086 |
| R-008242875-000E | 1.058467708 | 0.201659 |
| R-008242755-000K | 1.055026208 | 0.170259 |
| R-008053201-001U | 1.018359125 | 0.318291 |
| R-008053277-001T | 0.810187625 | 0.086756 |
| R-008242977-000G | 0.809731958 | 0.06978 |
| R-008242770-000B | 0.803155958 | 0.345009 |
| R-008053268-001J | 0.799442375 | 0.037365 |
| R-008053213-001D | 0.772986125 | 0.224806 |
| R-008242806-000S | 0.762979708 | 0.024387 |
| R-008242824-000J | 0.723746708 | 0.48361 |
| R-008242932-000U | 0.703996458 | 0.18334 |
| R-008053244-001P | 0.690707875 | 0.302274 |
| R-008242833-000T | 0.678461708 | 0.166545 |
| R-008053272-001Z | 0.630352375 | 0.043378 |
| R-008242782-000L | 0.587080458 | 0.251088 |
| R-008242812-000Z | 0.572647458 | 0.184346 |
| R-008053221-001D | 0.491621875 | 0.136166 |
| R-008053232-001E | 0.488353625 | 0.226264 |
| R-008053253-001Y | 0.484607375 | 0.347801 |
| R-008242848-000D | 0.424407208 | 0.079479 |
| R-008242749-000C | 0.421712458 | 0.051655 |
| R-008053247-001R | 0.393854875 | 0.318378 |
| R-008242818-000B | 0.390418708 | 0.118813 |
| R-008053248-001Z | 0.373189375 | 0.239154 |
| R-008242791-000V | 0.358399208 | 0.003107 |
| R-008242896-000Y | 0.347511958 | 0.010272 |
| R-008053261-001Y | 0.344888375 | 0.230803 |
| R-008242758-000L | 0.328003208 | 0.057317 |
| R-008242737-000T | 0.289492708 | 0.068709 |
| R-008053239-001R | 0.283683375 | 0.277815 |
| R-008053210-001C | 0.281234625 | 0.072724 |
| R-008242827-000K | 0.280964208 | 0.125803 |
| R-008242800-000P | 0.264998708 | 0.024276 |
| R-008053237-001Y | 0.245479125 | 0.142093 |
| R-008242926-000L | 0.240561208 | 0.106733 |
| R-008053228-001P | 0.225560125 | 0.532478 |
| R-008053254-001G | 0.150863625 | 0.252205 |
| R-008053271-001R | 0.104275375 | 0.058112 |
| R-008242842-000B | 0.077941208 | 0.155598 |
| R-008053264-001Z | 0.056381625 | 0.065499 |
| R-008053231-001W | 0.056175375 | 0.13034 |
| R-008053223-001W | 0.014235625 | 0.616892 |
| R-008053241-001N | −0.010418625 | 0.10341 |
| R-008053259-001A | −0.017200625 | 0.024095 |
| R-008053234-001X | −0.025797875 | 0.319636 |
| R-008053273-001H | −0.050075625 | 0.181932 |
| R-008053249-001H | −0.077520875 | 0.041735 |
| R-008100897-000H | −0.079607375 | 0.047599 |
| R-008053266-001S | −0.134196875 | 0.368603 |
| R-008053229-001Y | −0.233623375 | 0.169998 |
| R-008053252-001P | −0.285727625 | 0.365181 |
| R-008053251-001F | −0.681625375 | 0.159068 |
| R-008053236-001P | −0.980815375 | 1.874708 |

[0411] Select high ranking siNAs from Table 4b were further analyzed for efficacy and potency in HepG2 cells using dose response curves. The results for these siNAs are shown in Table 5. The potency 50 is the calculated siNA transfection concentration that produces 50% target mRNA knockdown. The IC50 was determined after 24 hour exposure time.

TABLE 5
Dose response data for various siNAs in HepG2
cells. Calculated maximum ΔΔCt is determined
from the dose response curve.

| | | POTENCY 50 | IC50 |
|---|---|---|---|
| siNA Duplex ID | Mean ΔΔCt | (nM) | (nM) |
| R-008242746-000B | 3.756600396 | 0.00386 | 0.003175983 |
| R-008242797-000X | 3.230688896 | 0.00318 | 0.002445289 |
| R-008242851-000K | 3.665808146 | 0.00292 | 0.002394033 |
| R-008242866-000W | 3.001087729 | 0.00522 | 0.003911604 |
| R-008242878-000F | 2.855930729 | 0.00449 | 0.003416977 |
| R-008242920-000J | 3.154754979 | 0.00499 | 0.003567228 |
| R-008242923-000K | 2.830502479 | 0.00730 | 0.005311274 |
| R-008242938-000W | 3.098595146 | 0.00771 | 0.005975071 |
| R-008242953-000M | 2.829855979 | 0.00507 | 0.003448985 |
| R-008242956-000N | 3.331811396 | 0.00533 | 0.004149503 |
| R-008242962-000W | 3.253016229 | 0.00643 | 0.005181808 |
| R-008242980-000N | 3.070762396 | 0.00288 | 0.002271060 |

### Midscale Experiments

[0412] Based on an analysis of the results shown in the previous table 3a several siNAs, were selected for scaleup and further optimization and/or analysis.

In Vivo Knockdown of PHD2 mRNA

[0413] To assess the in vivo duration of the PHD2 siNAs, five siNAs with human/mouse homology and a large log 2(fold change) data from Table 4a were tested. The siNA were synthesized as described above and the log 2(fold change) (reported as ΔΔCt) after 1, 3, and 7 days was determined using quantitative RT-PCR. The results are shown in Table 6a.

TABLE 6a
Log2(fold change) of siNAs in mice on days 1, 3, and 7.

| | in vivo | in vivo | in vivo |
|---|---|---|---|
| | 1 day | 3 day | 7 day |
| siNA Duplex ID | ΔΔCt | ΔΔCt | ΔΔCt |
| R-008039846-001E | 3.38 | 3.24 | 2.20 |
| R-008039847-001N | 1.88 | 1.11 | 1.13 |
| R-008039882-001P | 2.42 | 2.07 | 0.87 |
| R-008039848-001X | 2.87 | 2.68 | 1.93 |
| R-008039849-001F | 2.41 | 2.29 | 2.41 |

### Example 2: Efficacy Study in Balb/C Mice

[0414] In vivo efficacy studies were conducted in Balb/C mice for two of the five siNA sequences, R-008039846-001E and R-008039847-001N, in Table 6a. Mice were dosed IV via tail vein injections with LNP encapsulated siNAs or vehicle control using 3 different dosing schemes: one 3 mg/kg dose on day 0 with measurements on day 7, day 14, and day 21, two doses (either 3, 1, or 0.3 mg/kg) on day 0 and day 21 with measurements on day 7, 14, 21, 28, 35, 42, or 6 doses (either 1, 03, or 0.1 mg/kg) on days 0, 28, 56, 84, 112, and 140 with measurements on day 0, 14, 28, 42, 56, 70, 84, 98, 112, 126, 140, 154, 168, 182, and 196. Serum EPO was measured using an Epo ELISA kit (Quantikine, R&D systems) according to the supplied product protocol. Blood collected by cardiac puncture for terminal bleeds (FIGS. 11, 12A, 12B, 13A, 13B, 14A, 14B, 15, 16A, 16B, 17, 18A, 18B, and 18C) and by cardiocentesis for FIGS. 19A and 19B were analyzed for hematological changes. Liver and kidney tissues from each animal were collected for RNA purification. Total RNA was purified using RNeasy 96 kit (Qiagen, Cat #74182). cDNA was generated from total RNA using High Capacity cDNA Reverse Transcription Kit (Cat #: 4368813). Quantitative PCR reactions were performed with TaqMan Universal PCR Master Mix (Cat #: 4304437). Mouse PHD2 TaqMan Gene Expression Assay (Mm00459770_m1 or Mm00459769_m1) and mouse GAPDH TaqMan Gene Expression Assay (Cat #: 4352932E) were used to monitor the mRNA level of both transcripts. The expression level of PHD2 was normalized against GAPDH to minimize technical variations. All reverse transcription and quantitative PCR reagents are from Applied Biosystems, Inc.

[0415] As shown in FIGS. 11, 12A, 12B, 13A, 13B, 14A, and 14B, treatment of Balb/C mice with two siNAs of the invention resulted >75% knockdown of the Phd2 mRNA transcript 7 days post dose (FIG. 11) leading to increased Epo mRNA expression in the liver and kidney (FIGS. 12A and 12B) increased erythropoiesis (FIGS. 13A, 13B, 14A, and 14B) achieving a rise in hemoglobin >3 g/week for 3 weeks. The clinical target is 0.25-0.5 g/week. In the next experiment (FIGS. 15, 16A, 16B, 17, 18A, 18B, and 18C), treatment of Balb/C mice with two doses of a single siNAs at 3 different concentrations (3, 1, 0.3 mg/kg) resulted in a dose response for Phd2 mRNA knockdown (FIG. 15) that lead to a dose dependent increase in Epo mRNA expression in both the liver and kidney (FIGS. 16A and 16B) and dose dependent increases in reticulocytes (FIG. 17), RBCs, Hemoglobin, and Hematocrit (FIGS. 18A, 18B, and 18C). FIGS. 19A and 19B show temporal changes in Balb/C mice following chronic dosing of a Phd2 targeting siNA. Together, these data indicate that the administration of the invention leads to reduction in Phd2 mRNA transcript levels leading to an increase in erythropoiesis.

[0416] RACE experiments confirmed that the siNA constructs corresponding to Duplex ID Nos. R-008039846-001E and R-008039847-001N showed RISC mediated cleavage of target RNA. Thus, verifying that the RNA knockdown was the direct result of RNAi activity.

### Example 3: Determining In Vitro Serum Stability of siNAs

[0417] siNAs are reconstituted as 50 μM to 100 μM stock solution with H₂O and added to human serum pre-warmed to 37° C. to a final concentration of 20 μg/mL. The mixture is then incubated at 37° C. for 0, 1 and 2 hours. At the end of each time point, the reactions are stopped by mixing with equal volume of Phenomenex Lysis-Loading Buffer. Oligonucleotides are purified in 96-well format by Phenomenex Solid Phase Extraction and lyophilized until dry with Labconco Triad Lyo-00417. The lyophilized samples are reconstituted in 150 μL of 1 mM EDTA prepared with RNase-free H₂O. The sample solutions re then diluted 5 fold with 1 mM EDTA for liquid chromatography/mass spectrometry (LC/MS) analysis on ThermoFisher Orbitrap. Serum metabolites of the siNAs were determined based on the measured molecular weights.

### Example 4: Testing of Cytokine Induction

[0418] To assess immunostimulative effects of various siNAs of the invention loaded in lipid nanoparticles (DLinDMA/Cholesterol/S-PEG-C-DMA/DSPC in a 40/48/2/10 ratio), C57Bl/6 mice are dosed with a single 3 mpk dose of LNP formulated siNAs through tail vein injection. Serum or plasma samples are collected at 3 and 24 hours post-dose. The cytokine and chemokine levels in these samples is measured with the SearchLight IR Cytokine Array from Aushon Biosciences according to the manufacturer's instruction. The cytokines and chemokines measured are IL-1α, IL-1β, IL-6, KC, IL-10, IFNγ, TNF, GMCSF, MIP-1β, MCP-1/JE, and RANTES.

### Example 5: Pharmacodynamic Study in Non-Human Primates

[0419] Rhesus macaque monkeys are dosed with a single 2.5 mpk dose of siNA loaded lipid nanoparticles through intravenous infusion. To monitor target mRNA knockdown, liver biopsies are performed at various time points pre- and post-dose with 16T gauge Menghini needles for about 20 mg tissue per animal. Whole blood and serum/plasma is also collected at different time points pre- and post-dose to monitor potential toxicity associated with the treatments. All procedures adhere to the regulations outlined in the USDA Animal Welfare Act (9 CFR, Parts 1, 2 and 3) and the conditions specified in The Guide for Care and Use of Laboratory Animals (ILAR publication, 1996, National Academy Press).

[0420] LNP formulations of the invention comprising the siNA are tested. Log2(fold change) in PHD2 gene expression is determined on days 3, 7, 14, and 28 days post-dosing. Pre-dose PHD2 expression levels for the monkey is measured 7 days before the first dosing.

### Example 6: Specific and Sustained Knockdown of Phd1, Phd2, and Phd3 with siNAs Administered Alone or in Combination

[0421] Animals were treated once weekly (i.v. doses on days 0, 7 and 14) with siNAs specifically targeting hepatic Phd1, Phd2, and Phd3 alone or in combination either as a single siNA (3 mpk total dose) or combinations of siNAs (1.5 mpk each for a total dose of 3 mpk). A single siNA targeting both Phd1 and Phd3 (Phd1.3) served as a control allowing for comparison of a siNA combination to a single siNA targeting the same transcripts. Each group contained 5 animals. Gene expression analysis of liver samples collected on day 6 revealed sustained knockdown of >70%, >80% and >80% for Phd1, Phd2 and Phd3, respectively in liver across all groups containing siRNAs targeting these transcripts. Individual or combinatorial hepatic knockdown of Phd1 and Phd3 mRNA had no effect on hepatic Epo mRNA levels but silencing of Phd2 mRNA increased hepatic Epo mRNA levels. All Phd2 siRNA-treated groups exhibited a significant increase in hepatic Epo mRNA relative to the control siNA. Silencing of both Phd1 and Phd2 elevated hepatic Epo further relative to the Phd2 siRNA treatment alone, and the simultaneous inhibition of Phd1, Phd2, and Phd3 induced hepatic Epo even further relative to the Phd1+2 siRNA combination. Results are shown in Table 6b.

TABLE 6a
siNA Combination Data

| mRNA Treatment | Phd1 | Phd2 | Phd3 | Epo | 1st siNA | 2nd siNA |
|---|---|---|---|---|---|---|
| PBS | 100 | 100 | 100 | 1 | | |
| Cntrl siNA | 100 | 100 | 100 | 1 | R-008039829-001W | |
| 2 | 100 | 5 | 100 | 2.4 | R-008039846-001E | |
| 3 | 100 | 100 | 7 | 1 | R-008053961-001S | |
| 2 + 3 | 100 | 7 | 7 | 8.1 | R-008039846-001E | R-008053961-001S |
| 1 | 23 | 100 | 100 | 1 | R-008054086-001B | |
| 1.3 | 16 | 100 | 11 | 1 | R-008147454-000S | |
| 1 + 3 | 30 | 100 | 8 | 1 | R-008054086-001B | R-008053961-001S |
| 1 + 2 | 28 | 9 | 100 | 16.4 | R-008054086-001B | R-008039846-001E |
| 1.3 + 2 | 18 | 8 | 37 | 691.4 | R-008147454-000S | R-008039846-001E |

[0422] In Table 6b above, siNA treatments are indicated by a number representing the targeted Phd transcript where 1 represents the Phd1 siNA, 2 the Phd2 siNA, 3 the Phd3 siNA, and 1.3 representing the single siNA that targets both Phd1 and Phd3. The combination of two siRNAs is indicated by a +sign. PBS and siNA cntrl represent the negative control groups. Changes in expression are shown as percent remaining for Phd1, Phd2, and Phd3 mRNA and as fold increase for Epo mRNA compared to PBS treatment

[0423] In certain embodiments, the invention features a composition comprising a siNA targeting PHD2, and a siNA targeting PHD1, PHD3, or both PHD1 and PHD3.

### Example 6: Short Interfering Nucleic Acid (siNA) LNP Formulations

### A. General Process Description for LNP Formulations:

[0424] The lipid nanoparticles are prepared by an impinging jet process. The particles are formed by mixing lipids dissolved in alcohol with siNA dissolved in a citrate buffer. The mixing ratio of lipids to siNA is targeted at 45-55% lipid and 65-45% siNA. The lipid solution contains a cationic lipid, a helper lipid (cholesterol), PEG (e.g. PEG-C-DMA, PEG-DMG) lipid, and DSPC at a concentration of 5-15 mg/mL with a target of 9-12 mg/mL in an alcohol (for example ethanol). The ratio of the lipids has a mole percent range of 25-98 for the cationic lipid with a target of 35-65, the helper lipid has a mole percent range from 0-75 with a target of 30-50, the PEG lipid has a mole percent range from 1-15 with a target of 1-6, and the DSPC has a mole percent range of 0-15 with a target of 0-12. The siNA solution contains one or more siNA sequences at a concentration range from 0.3 to 1.0 mg/mL with a target of 0.3-0.9 mg/mL in a sodium citrate buffered salt solution with pH in the range of 3.5-5. The two liquids are heated to a temperature in the range of 15-40° C., targeting 30-40° C., and then mixed in an impinging jet mixer instantly forming the LNP. The teeID has a range from 0.25 to 1.0 mm and a total flow rate from 10-600 mL/minute The combination of flow rate and tubing ID has the effect of controlling the particle size of the LNPs between 30 and 200 nm. The solution is then mixed with a buffered solution at a higher pH with a mixing ratio in the range of 1:1 to 1:3 vol:vol but targeting 1:2 vol:vol. This buffered solution is at a temperature in the range of 15-40° C., targeting 30-40° C. The mixed LNPs are held from 30 minutes to 2 hrs prior to an anion exchange filtration step. The temperature during incubating is in the range of 15-40° C., targeting 30-40° C. After incubating, the solution are filtered through a 0.8 um filter containing an anion exchange separation step. This process uses tubing IDs ranging from 1 mm ID to 5 mm ID and a flow rate from 10 to 2000 mL/minute The LNPs are concentrated and diafiltered via an ultrafiltration process where the alcohol is removed and the citrate buffer is exchanged for the final buffer solution such as phosphate buffered saline. The ultrafiltration process uses a tangential flow filtration format (TFF). This process uses a membrane nominal molecular weight cutoff range from 30-500 KD. The membrane format is hollow fiber or flat sheet cassette. The TFF processes with the proper molecular weight cutoff retains the LNP in the retentate and the filtrate or permeate contains the alcohol; citrate buffer; and final buffer wastes. The TFF process is a multiple step process with an initial concentration to a siNA concentration of 1-3 mg/mL. Following concentration, the LNPs solution is diafiltered against the final buffer for 10-20 volumes to remove the alcohol and perform buffer exchange. The material is then concentrated an additional 1-3 fold. The final steps of the LNP process are to sterile filter the concentrated LNP solution and vial the product.

### Analytical Procedure:

1) siNA Concentration

[0425] The siNA duplex concentrations are determined by Strong Anion-Exchange High-Performance Liquid Chromatography (SAX-HPLC) using Waters 2695 Alliance system (Water Corporation, Milford MA) with a 2996 PDA detector. The LNPs, otherwise referred to as RNAi Delivery Vehicles (LNPs), are treated with 0.5% Triton X-100 to free total siNA and analyzed by SAX separation using a Dionex BioLC DNAPac PA 200 (4×250 mm) column with UV detection at 254 nm. Mobile phase is composed of A: 25 mM NaClO₄, 10 mM Tris, 20% EtOH, pH 7.0 and B: 250 mM NaClO₄, 10 mM Tris, 20% EtOH, pH 7.0 with a liner gradient from 0-15 min and a flow rate of 1 ml/minute. The siNA amount is determined by comparing to the siNA standard curve.

### 2) Encapsulation Rate

[0426] Fluorescence reagent SYBR Gold is employed for RNA quantitation to monitor the encapsulation rate of LNPs. LNPs with or without Triton X-100 are used to determine the free siNA and total siNA amount. The assay is performed using a SpectraMax M5e microplate spectrophotometer from Molecular Devices (Sunnyvale, CA). Samples are excited at 485 nm and fluorescence emission is measured at 530 nm. The siNA amount is determined by comparing to an siNA standard curve.

$$Encapsulation rate = ( 1 - free siNA / total siNA ) \times 100 \%$$

### 3) Particle Size and Polydispersity

[0427] LNPs containing 1 g siNA are diluted to a final volume of 3 ml with 1×PBS. The particle size and polydispersity of the samples is measured by a dynamic light scattering method using ZetaPALS instrument (Brookhaven Instruments Corporation, Holtsville, NY). The scattered intensity is measured with He—Ne laser at 25° C. with a scattering angle of 90°.

### 4) Zeta Potential Analysis

[0428] LNPs containing 1 g siNA are diluted to a final volume of 2 ml with 1 mM Tris buffer (pH 7.4). Electrophoretic mobility of samples is determined using ZetaPALS instrument (Brookhaven Instruments Corporation, Holtsville, NY) with electrode and He—Ne laser as a light source. The Smoluchowski limit is assumed in the calculation of zeta potentials.

### 5) Lipid Analysis

[0429] Individual lipid concentrations are determined by Reverse Phase High-Performance Liquid Chromatography (RP-HPLC) using Waters 2695 Alliance system (Water Corporation, Milford MA) with a Corona charged aerosol detector (CAD) (ESA Biosciences, Inc, Chelmsford, MA). Individual lipids in LNPs are analyzed using an Agilent Zorbax SB-C18 (50×4.6 mm, 1.8 m particle size) column with CAD at 60° C. The mobile phase is composed of A: 0.1% TFA in H₂O and B: 0.1% TFA in IPA. The gradient changes from 60% mobile phase A and 40% mobile phase B from time 0 to 40% mobile phase A and 60% mobile phase B at 1.00 min; 40% mobile phase A and 60% mobile phase B from 1.00 to 5.00 min; 40% mobile phase A and 60% mobile phase B from 5.00 min to 25% mobile phase A and 75% mobile phase B at 10.00 min; 25% mobile phase A and 75% mobile phase B from 10.00 min to 5% mobile phase A and 95% mobile phase B at 15.00 min; and 5% mobile phase A and 95% mobile phase B from 15.00 to 60% mobile phase A and 40% mobile phase B at 20.00 min with a flow rate of 1 ml/minute. The individual lipid concentration is determined by comparing to the standard curve with all the lipid components in the LNPs with a quadratic curve fit. The molar percentage of each lipid is calculated based on its molecular weight.

### B. General Formulation Procedure for CLinDMA/Cholesterol/PEG-DMG at a Ratio of 71.9:20.2:7.9.

[0430] siNA solutions were prepared by dissolving siNAs in 25 mM citrate buffer (pH 4.0) at a concentration of 0.8 mg/mL. Lipid solutions were prepared by dissolving a mixture of 2S-Octyl-ClinDMA, cholesterol and PEG-DMG at a ratio of 71.9:20.2:7.9 in absolute ethanol at a concentration of about 10 mg/mL. Equal volume of siNA and lipid solutions were delivered with two syringe pumps at the same flow rates to a mixing T connector. The resulting milky mixture was collected in a sterile bottle. This mixture was then diluted slowly with an equal volume of citrate buffer, and filtered through a size exclusion hollow fiber cartridge to remove any free siNA in the mixture. Ultra filtration against citrate buffer (pH 4.0) was employed to remove ethanol (test stick from ALCO screen), and against PBS (pH 7.4) to exchange buffer. The final LNP was obtained by concentrating to a desired volume and sterile filtered through a 0.2 mm filter. The obtained LNPs were characterized in term of particle size, alcohol content, total lipid content, nucleic acid encapsulated, and total nucleic acid concentration.

### C. General LNP Preparation For Various Formulations in Table 10

[0431] siNA nanoparticle suspensions in Table 10 were prepared by dissolving siNAs and/or carrier molecules in 20 mM sodium citrate buffer (pH 5.0) at a concentration of about 0.40 mg/mL. Lipid solutions were prepared by dissolving a mixture of cationic lipid (e.g., (13Z,16Z)—N,N-dimethyl-3-nonyldocosa-13,16-dien-1-amine, see structure in Table 11), DSPC, Cholesterol, and PEG-DMG (ratios shown in Table 10) in absolute ethanol at a concentration of about 8 mg/mL. The nitrogen to phosphate ratio was approximated to 6:1.

[0432] Nearly equal volumes of siNA/carrier and lipid solutions were delivered with two FPLC pumps at the same flow rates to a mixing T connector. A back pressure valve was used to adjust to the desired particle size. The resulting milky mixture was collected in a sterile glass bottle. This mixture was then diluted with an equal volume of citrate buffer, followed by equal volume of PBS (pH 7.4), and filtered through an ion-exchange membrane to remove any free siNA/carrier in the mixture. Ultra filtration against PBS (7.4)) was employed to remove ethanol and to exchange buffer. The final LNP was obtained by concentrating to the desired volume and sterile filtered through a 0.2 m filter. The obtained LNPs were characterized in term of particle size, Zeta potential, alcohol content, total lipid content, nucleic acid encapsulated, and total nucleic acid concentration.

### LNP Manufacture Process

[0433] In a non-limiting example, LNPs were prepared in bulk as follows. The process consisted of (1) preparing a lipid solution; (2) preparing an siNA/carrier solution; (3) mixing/particle formation; (4) incubation; (5) dilution; (6) ultrafiltration and concentration.

### 1. Preparation of Lipid Solution

[0434] 2 L glass reagent bottles and measuring cylinders were depyrogenated. The lipids were warmed to room temperature. Into the glass reagent bottle was transferred 8.0 g of (13Z,16Z)—N,N-dimethyl-3-nonyldocosa-13,16-dien-1-amine with a pipette and 1.2 g of DSPC, 3.5 g of Cholesterol, 0.9 g of PEG-DMG were added. To the mixture is added 1 L of ethanol. The reagent bottle was placed in heated water bath, at a temperature not exceeding 50° C. The lipid suspension was stirred with a stir bar. A thermocouple probe was put into the suspension through one neck of the round bottom flask with a sealed adapter. The suspension was heated at 30-40° C. until it became clear. The solution was allowed to cool to room temperature.

2. Preparation of siNA/Carrier Solution

[0435] Into a sterile container (Corning storage bottle) was weighed 0.4 g times the water correction factor (approximately 1.2) of siNA powder. The siNA was transferred to a depyrogenated 2 L glass reagent bottle. The weighing container was rinsed 3× with citrate buffer (20 mM, pH 5.0) and the rinses were placed into the 2 L glass bottle, QS with citrate buffer to 1 L. The concentration of the siNA solution was determined with a UV spectrometer using the following procedure. 20 μL was removed from the solution, diluted 50 times to 1000 μL, and the UV reading recorded at A260 nm after blanking with citrate buffer. This was repeated. Note, if the readings for the two samples are consistent, an average can be taken and the concentration calculated based on the extinction coefficients of the siNAs. If the final concentration is out of the range of 0.40±0.01 mg/mL, the concentration can be adjusted by adding more siNA/carrier powder, or adding more citrate buffer. This process can be repeated for the second siNA, if applicable

[0436] When the siNA/carrier solution comprised a single siNA duplex instead of a cocktail of two or more siNA duplexes and/or carriers, then the siNA/carrier was dissolved in 20 mM citrate buffer (pH 5.0) to give a final concentration of 0.4 mg/mL.

[0437] The lipid and ethanol solutions were then sterile filtered through a Pall Acropak 20 0.8/0.2 μm sterile filter PN 12203 into a depyrogenated glass vessel using a Master Flex Peristaltic Pump Model 7520-40 to provide a sterile starting material for the encapsulation process. The filtration process was run at an 80 mL scale with a membrane area of 20 cm². The flow rate was 280 mL/minute. This process can be scaled by increasing the tubing diameter and the filtration area.

### 3. Particle Formation—Mixing Step

[0438] Using a two-barrel syringe driven pump (Harvard 33 Twin Syringe), the sterile lipid/ethanol solution and the sterile siNA/carrier or siNA/carrier cocktail/citrate buffer (20 mM citrate buffer, pH 5.0) solutions were mixed in a 0.5 mm ID T-mixer (Mixing Stage I) at equal, or nearly equal, flow rates. The resulting outlet LNP suspension contained 40-50 vol % ethanol. To obtain a 45 vol % ethanol outlet suspension, the sterile lipid/ethanol and the sterile siNA/carrier or siNA/carrier cocktail/citrate buffer solutions were mixed at flow rates of 54 mL/min and 66 mL/min, respectively, such that the total flow rate of the mixing outlet is 120 mL/min.

### 4. Dilution

[0439] The outlet stream of Mixing Stage I was fed directly into a 4 mm ID T-mixer (Mixing Stage II), where it was diluted with a buffered solution at higher pH (20 mM sodium citrate, 300 mM sodium chloride, pH 6.0) at a ratio of 1:1 vol:vol %. This buffered solution was at a temperature in the range of 30-40° C., and was delivered to the 4 mm T-mixer via a peristaltic pump (Cole Parmer MasterFlex L/S 600 RPM) at a flow rate of 120 m/min.

[0440] The outlet stream of Mixing Stage II was fed directly into a 6 mm ID T-mixer (Mixing Stage III), where it was diluted with a buffered solution at higher pH (PBS, pH 7.4) at a ratio of 1:1 vol:vol %. This buffered solution was at a temperature in the range of 15-25° C., and was delivered to the 6 mm T-mixer via peristaltic pump (Cole Parmer MasterFlex L/S 600 RPM) at a flow rate of 240 m/min.

5. Incubation and Free siNA Removal

[0441] The outlet stream of Mixing Stage III was held after mixing for 30 minute incubation. The incubation was conducted at temperature of 35-40° C. and the in-process suspension was protected from light. Following incubation, free (un-encapsulated) siNA was removed via anion exchange with Mustang Q chromatography filters (capsules). Prior to use, the chromatography filters were pre-treated sequentially with flushes of 1N NaOH, 1M NaCl, and a final solution of 12.5 vol % ethanol in PBS. The pH of the final flush was checked to ensure pH<8. The incubated LNP stream was then filtered via Mustang Q filters via peristaltic pump (Cole Parmer MasterFlex L/S 600 RPM) at flow rate of approximately 100 m/min. The filtered stream was received into a sterile glass container for ultrafiltration and concentration as follows.

### 6. Ultrafiltration, Concentration and Sterile Filtration

[0442] The ultrafiltration process is a timed process and the flow rates must be monitored carefully. This is a two step process; the first is a concentration step taking the diluted material and concentrating approximately 8-fold, to a concentration of approximately 0.3-0.6 mg/mL siNA.

[0443] In the first step, a ring-stand with a ultrafiltration membrane 100 kDa PES (Spectrum Labs) installed was attached to a peristaltic pump (Spectrum KrosFloII System). 9.2 L of sterile distilled water was added to the reservoir; 3 L was drained to waste and the remainder was drained through permeate to waste. 5.3 L of 0.25 N sodium hydroxide was added to the reservoir with 1.5 L drained to waste and 3.1 L drained through permeate to waste. The remaining sodium hydroxide was held in the system for sanitization (at least 10 minutes), and then the pump was drained. 9.2 L of 70 (v/v) % isopropyl alcohol was added to the reservoir with 1.5 L drained to waste and the remainder drained through permeate to waste. 6 L of conditioning buffer (12.5% ethanol in phosphate buffered saline) was added with 1.5 L drained to waste and the remainder drained though the permeate until the waste was of neutral pH (7-8). A membrane flux value was recorded, and the pump was then drained.

[0444] The diluted LNP solution was placed into the reservoir to the 1.1 L mark. The pump was turned on at 2.3 L/min. After 5 minutes of recirculation, the permeate pump was turned on at 62.5 m/min and the liquid level was constant at approximately 950 mL in the reservoir. The diluted LNP solution was concentrated from 9.8 L to 1.1 L in 140 minutes, and the pump was paused when all the diluted LNP solution has been transferred to the reservoir.

[0445] The second step was a diafiltration step exchanging the ethanol/aqueous buffer to phosphate buffered saline. During this step, approximately 10-20 diafiltration volumes of phosphate buffered saline were used. Following diafiltration, a second concentration was undertaken to concentrate the LNP suspension 3-fold to approximately 1-1.5 mg/mL siRNA. The concentrated suspension was collected into sterile, plastic PETG bottles. The final suspension was then filtered sequentially via Pall 0.45 um PES and Pall 0.2 um PES filters for terminal sterilization prior to vial filling.

[0446] The obtained LNPs were characterized in terms of particle size, Zeta potential, alcohol content, total lipid content, nucleic acid encapsulated, and total nucleic acid concentration.

### D. Synthesis of Novel Cationic Lipids

[0447] Synthesis of the novel cationic lipids is a linear process starting from lipid acid (i). Coupling to N,O-dimethyl hydroxylamine gives the Weinreb amide ii. Grignard addition generates ketone iii. Titanium mediated reductive amination gives final products of type iv.

[chemical structure]

[0448] Synthesis of the single carbon homologated cationic lipids v is a linear process starting from lipid ketone (iii). Conversion of the ketone to the nitrile (iv) is accomplished via treatment with TOSMIC and potassium tert-butoxide. Reduction of the nitrile to the primary amine followed by reductive amination provides final cationic lipids v.

[chemical structure]

[0449] Synthesis of two carbon homologated cationic lipids viii is a linear process starting from lipid ketone (iii). Conversion of the ketone to the α,β-unsaturated amide vi is accomplished under Peterson conditions. Conjugate reduction of the α,β-unsaturation is performed using LS-Selectride to give amide vii. Reduction of the amide with lithium aluminum hydride provides final cationic lipids viii.

[chemical structure]

[0450] Cyclopropyl containing lipids are prepared according to General Scheme 4. Unsaturated Weinreb amides ii are subjected to Simmons-Smith cyclopropanation conditions to give cyclopropyl containing Weinreb amides ix. These are carried on to final products as outlined in General Schemes 1-3.

[chemical structure]

[0451] Synthesis of allylic amine cationic lipids xv is a linear process starting with aldehyde x. Addition of t-butyl aceate generates β-hydroxy ester xi. Conversion of the hydroxyl functionality to a fluoro group followed by acid treatment generates β-fluoro acid xii. Conversion of the acid to the Weinreb amide followed by Grignard addition gives the β-fluoro ketone xiv. Reductive amination results in simultaneous elimination to generate the desired allylic amine xv.

[chemical structure]

### 20,23-nonacosadien-10-amine, N,N-dimethyl-, (20Z,23Z) (Compound 1)

[chemical structure]

[0452] 11,14-Eicosadienoic acid, (11Z,14Z)- (50 g, 162 mmol), N,O-Dimethylhydroxylamine hydrochloride (31.6 g, 324 mmol), HOAt (44.1 g, 324 mmol), Et₃N (45.2 mL, 324 mmol), and EDC (62.1 g, 324 mmol) were mixed in DCM (810 mL) and stirred overnight at ambient temperature. Reaction was then washed 5×700 mL water, then washed 1×600 mL 1 M NaOH, dried with sodium sulfate, filtered through celite and evaporated to obtain 53.06 g (93%) 11,14-eicosadienamide, N-methoxy-N-methyl-, (11Z,14Z) as a clear golden oil. ¹H NMR (400 MHz, CDCl₃) δ 5.35 (m, 4H), 3.68 (s, 3H), 3.18 (s, 3H), 2.77 (m, 2H), 2.41 (t, J=7 Hz, 2H), 2.05 (m, 4H), 1.63 (m, 2H), 1.40-1.26 (m, 18H), 0.89 (t, J=7 Hz, 3H).

[chemical structure]

[0453] 11,14-eicosadienamide, N-methoxy-N-methyl-, (11Z,14Z)-1 (4 g, 11.38 mmol) was dissolved in dry THF (50.0 ml) in a 250 mL flask then 1 M nonylmagnesium bromide (22.76 ml, 22.76 mmol) was added under nitrogen at ambient temperature. After 10 min, the reaction was slowly quenched with excess sat. aq NH₄Cl. The reaction was washed into a separatory funnel with hexane and water, shaken, the lower aqueous layer discarded, the upper layer dried with sodium sulfate, filtered, and evaporated to give crude ketone as a golden oil. To the above crude ketone was added dimethylamine (2 M in THF) (14.22 ml, 28.4 mmol) followed by Ti(O-i-Pr)₄ (6.67 ml, 22.76 mmol) and let stir overnight. The next day, added EtOH (50 ml) followed by NaBH₄ (0.646 g, 17.07 mmol). After 5 min of stirring, directly injected entire reaction onto a 40 g silica column that was in line with a 330 g silica column. Eluted 10 min 100% DCM, then 30 min 0-15% MeOH/DCM, collected 20,23-nonacosadien-10-amine, N,N-dimethyl-, (20Z,23Z) (1) (2.45 g, 5.47 mmol, 48.1% yield) as a faintly golden oil. ¹H NMR (400 MHz, CDCl₃) δ 5.35 (m, 4H), 2.78 (m, 2H), 2.23 (m, 1H), 2.21 (s, 6H), 2.05 (m, 4H), 1.45-1.16 (m, 38H), 0.89 (in, 6H). HRMS calcd for C31H61N 448.4877, found 448.4872.

[0454] Compounds 2-30 are novel cationic lipids and were prepared according to the General Scheme 1 above.

| Com- | | |
|---|---|---|
| pound | Structure | HRMS |
| 2 | [chemical structure] | calcd C28H56N 406.4407, found 406.4405. |
| 3 | [chemical structure] | calcd C27H54N 392.4251, found 392.4250. |
| 4 | [chemical structure] | calcd C24H48N 350.3781, found 350.3770. |
| 5 | [chemical structure] | calcd C23H46N 336.3625, found 336.3613. |
| 6 | [chemical structure] | calcd C25H50N 364.3938, found 364.3941. |
| 7 | [chemical structure] | calcd C26H52N 378.4094, found 378.4081. |
| 8 | [chemical structure] | calcd C29H58N 420.4564, found 420.4562. |
| 9 | [chemical structure] | calcd C26H52N 378.4094, found 378.4089. |
| 10 | [chemical structure] | calcd C25H50N 364.3938, found 364.3931. |
| 11 | [chemical structure] | calcd C30H60N 434.4720, found 434.4717. |
| 12 | [chemical structure] | calcd C29H58N 420.4564, found 420.4561. |
| 13 | [chemical structure] | calcd C28H56N 406.4407, found 406.4404. |
| 14 | [chemical structure] | calcd C27H54N 392.4251, found 392.4245. |
| 15 | [chemical structure] | calcd C33H66N 476.5190, found 476.5196. |
| 16 | [chemical structure] | calcd C32H64N 462.5033, found 462.5045. |
| 17 | [chemical structure] | calcd C29H59N 422.4720, found 422.4726. |
| 18 | [chemical structure] | calcd C28H57N 408.4564, found 408.4570. |
| 19 | [chemical structure] | calcd C30H59N 434.4720, found 434.4729. |
| 20 | [chemical structure] | calcd C29H61N 424.4877, found 424.4875. |
| 21 | [chemical structure] | calcd C32H64N 462.5033, found 462.5023. |
| 22 | [chemical structure] | calcd C33H64N 474.5033, found 474.5033. |
| 23 | [chemical structure] | calcd C29H60N 422.4720, found 422.4716. |
| 24 | [chemical structure] | calcd C29H60N 422.4720, found 422.4718. |
| 25 | [chemical structure] | calcd C31H64N 450.5033, found 450.5031. |
| 26 | [chemical structure] | calcd C31H64N 450.5033, found 450.5034. |
| 27 | [chemical structure] | calcd C35H72N 506.5659, found 506.5635. |
| 28 | [chemical structure] | calcd C31H64N 450.5033, found 450.5037. |
| 29 | [chemical structure] | calcd C33H68N 478.5346, found 478.5358. |
| 30 | [chemical structure] | calcd C27H56N 394.4407, found 394.4407. |

### (12Z,15Z)—N,N-dimethyl-2-nonylhenicosa-12,15-dien-1-amine (Compound 31)

[chemical structure]

[0455] A solution of keton iii (4.0 g, 9.55 mmol), TOSMIC (2.4 g, 12.4 mmol) in dimethoxyethane (45 mL) was cooled to 0° C. and treated with potassium tert-butoxide (19.1 mmol, 19.1 mL of a 1M solution in tBuOH). After 90 minutes, the reaction was partitioned between hexanes and water. The organics were washed with water, dried over sodium sulfate, filtered and evaporated in vacuo. This material was purified by flash chromatography (0-5% EtOAc/hexanes) to give desired product (containing ˜20% of s.m.). This mixture was carried into next step as is. LC/MS (M+H)=430.6.

[chemical structure]

[0456] Lithium aluminum hydride (23.9 mmol, 23.9 mL of a 1M solution in THF) was added directly to nitrile iv (3.42 g, 8 mmol) at ambient temperature and the reaction was stirred for 20 minutes. The reaction was diluted with 100 mL THF, cooled to 0° C. and carefully quenched with sodium sulfate decahydrate solution. The solids were filtered off and washed with THF. The filtrate was evaporated in vacuo and carried directly into next reaction crude. LC/MS (M+H)=434.6.

[chemical structure]

[0457] A solution of primary amine (3.45 g, 6.2 mmol) in dichloroethane (100 mL) was treated with formaldehyde (1.6 mL, 21.7 mmol) followed by sodium triacetoxyborohydride (6.6 g, 31 mmol). After 5 minutes, the reaction was partitioned between dichloromethane and 1N NaOH. The organics were dried over sodium sulfate, filtered and evaporated in vacuo. The crude mixture was purified by reverse phase preparative chromatography (C8 column) to provide (12Z,15Z)—N,N-dimethyl-2-nonylhenicosa-12,15-dien-1-amine. HRMS calc'd 462.5033, found 462.5026. ¹H NMR (400 MHz, CDCl₃) δ 5.35 (m, 4H), 2.78 (2H, t, J=5.6 Hz), 2.18 (s, 6H), 2.05 (m, 6H), 1.3 (m, 39H), 0.89 (m, 6H).

### (13Z,16Z)—N,N-dimethyl-3-nonyldocosa-13,16-dien-1-amine (Compound 32)

[chemical structure]

[0458] The silyl amide Peterson reagent (3.1 g, 16.7 mmol) was dissolved in THF (35 mL) and cooled to −63° C. To this solution was added nBuLi (16.7 mmol, 6.7 mL of a 2.5M solution). The reaction was warmed to ambient temperature for 30 minutes. The ketone (5.0 g, 11.9 mmol) was dissolved in THF (25 mL) in a second flask. The Peterson reagent was transferred to the ketone solution at −60° C. The reaction was warmed to −40° C. for 1 hour, then warmed to 0° C. for 30 minutes. The reaction was quenched with sodium bicarbonate, diluted with additional water and partitioned between water/hexanes. The organics were washed with brine, dried over sodium sulfate, filtered and evaporated in vacuo. Purification by flash chromatography (0-40% MTBE/hexanes) gave α,β-unsatured amide vi. ¹H NMR (400 MHz, CDCl₃) δ 5.75 (s, 1H), 5.36 (m, 4H), 3.01 (s, 3H), 2.99 (s, 3H), 2.78 (t, 2H), 2.28 (t, 2H), 2.05 (m, 6H), 1.35 (m, 34H), 0.89 (m, 6H).

[chemical structure]

[0459] α,β-unsatured amide vi (1 g, 2.1 mmol) and LS-Selectride (4.1 mmol, 4.1 mL of a 1M solution) were combined in a sealed tube and heated to 60° C. for 24 hours. The reaction was cooled to ambient temperature and partitioned between ammonium chloride solution and heptane. The organics were dried over sodium sulfate, filtered and evaporated in vacuo to give amide vii. This intermediate was carried directly into next reaction crude.

[chemical structure]

[0460] To a solution of amide vii (2.85 g, 5.8 mmol) was added lithium aluminum hydride (8.7 mmol, 8.7 mL of a 1M solution). The reaction was stirred at ambient temperature for 10 minutes then quenched by slow addition of sodium sulfate decahydrate solution. The solids were filtered and washed with THF and the filtrate evaporated in vacuo. The crude mixture was purified by reverse phase preparative chromatography (C8 column) to provide (13Z,16Z)—N,N-dimethyl-3-nonyldocosa-13,16-dien-1-amine (Compound 32) as an oil. HRMS (M+H) calc'd 476.5190, found 476.5189. ¹H NMR (400 MHz, CDCl₃) δ 5.37 (m, 4H), 2.78 (t, 2H), 2.42 (m, 8H), 2.05 (q, 4H), 1.28 (m, 41H), 0.89 (m, 6H).

### N,N-dimethyl-1-(2-octylcyclopropyl)heptadecan-8-amine (Compound 33)

[chemical structure]

[0461] To a solution of oleic acid (1 g, 3.5 mmol) in DCM (500 mL) cooled to 0° C. was added CDI (0.63 g, 3.9 mmol). The reaction was warmed to ambient temperature for 30 minutes before cooling to 0° C. and treating first with triethylamine (0.39 g, 3.9 mmol) and then dimethyl hydroxylamine hydrochloride (0.38 g, 3.9 mmol). After 1 hour the reaction was partitioned between water and heptane. The organics were dried over magnesium sulfate, filtered and evaporate in vacuo to give crude Weinreb amide ii which was carried directly into next reaction.

[chemical structure]

[0462] A solution of diethylzinc (70.3 mmol, 70.3 mL of a 1M solution) in dichloromethane (130 mL) was cooled to −1° C. and treated dropwise with TFA (8.0 g, 70.3 mmol). After 30 minutes, diiodomethane (18.8 g, 70.3 mmol) was added and this was aged for 30 minutes in the ice bath. To this solution was added Weinreb amide ii (7.6 g, 23.4 mmol). The reaction was warmed to ambient temperature and stirred for 1 hour. The reaction was quenched with ammonium chloride solution (100 mL) and organic layer partitioned off, washed with 10% sodium thiosulfate, dried over magnesium sulfate, filtered and evaporated in vacuo. Purification was flash chromatography (0-30% MTBE/heptane) gave desired product ix. ¹H NMR (400 MHz, CDCl₃) δ 3.72 (s, 3H), 3.22 (s, 3H), 2.48 (t, 2H), 1.65 (m, 2H), 1.39 (m, 22H), 1.18 (m, 2H), 0.91 (t, 3H), 0.68 (m, 2H), 0.59 (m, 1H), −0.32 (m, 1H).

[chemical structure]

[0463] Conversion of Weinreb amide ix to Compound 33 was carried out in a manner analogous to that described for Compound 1 above (nonyl Grignard addition followed by reductive amination). LC/MS (M+H)=436.6. ¹H NMR (400 MHz, CDCl₃) δ 2.25 (s, 6H), 1.30 (m, 45H), 0.91 (m, 6H), 0.68 (m, 2H), 0.59 (m, 1H), −0.31 (m, 1H).

[0464] Compounds 34-43 are novel cationic lipids and were prepared according to General Schemes 1-4 above.

| Com- | | |
|---|---|---|
| pound | Structure | HRMS |
| 34 | [chemical structure] | calcd C30H62N 436.4877, found 436.4872. |
| 35 | [chemical structure] | calcd C32H66N 464.5190, found 464.5186. |
| 36 | [chemical structure] | calcd C34H70N 492.5503, found 492.5496. |
| 37 | [chemical structure] | calcd C33H66N 476.5190, found 476.5174. |
| 38 | [chemical structure] | calcd C29H60N 422.4720, found 422.4701. |
| 39 | [chemical structure] | calcd C30H62N 436.4877, found 436.4880. |
| 40 | [chemical structure] | calcd C32H66N 464.5190, found 464.5199. |
| 41 | [chemical structure] | calcd C30H62N 436.4877, found 436.4877. |
| 42 | [chemical structure] | calcd C30H62N 436.4877, found 436.4875. |
| 43 | [chemical structure] | LC/MS (M + H) 408.6. |

### (11E,20Z,23Z)—N,N-dimethylnonacosa-11,20,23-trien-10-amine (Compound 44)

[chemical structure]

[0465] To a solution of LDA (95 mmol, 47.5 mL of a 2M solution) in THF (127 mL) cooled to −78° C. was added t-butyl acetate. The reaction was stirred for 15 minutes followed by addition of aldehyde x. The reaction was immediately quenched with ammonium chloride solution, warmed to ambient temperature and partitioned between water/pentane. The organics were dried over sodium sulfate, filtered and evaporated in vacuo. LC/MS (M+H-tBu)=325.4.

[chemical structure]

[0466] Hydroxy ketone xi (7 g, 18.4 mmol) was dissolved in dichloromethane (150 mL) and cooled to 0° C. and treated with deoxofluor (7.3 g, 33.1 mmol). The reaction was warmed to ambient temperature with stirring for 16 hours followed by quenching with sodium bicarbonate solution. The reaction was partitioned and the organics dried over sodium sulfate, filtered and evaporate in vacuo. Flash column chromotagraphy (0-5% ethyl acetate/hexanes) gave the Q-fluoro ester.

[0467] Fluoro ester intermediate (6 g, 15.6 mmol) in dichloromethane was treated with hydrogen chloride (157 mmol, 39.2 mL of a 4M solution in dioxane) and the reaction was stirred at ambient temperature for 16 hours. The reaction was evaporated in vacuo to give desired β-fluoro acid xii. LC/MS (M+H)=327.3.

[chemical structure]

[0468] Fluoro carboxylic acid xii (5.1 g, 15.7 mmol), EDC (6.0 g, 31.4 mmol), N,O-dimethylhydroxylamine hydrochloride (3.1 g, 31.4 mmol), trimethylamine (4.0 g, 39.2 mmol), and HOAt (4.3 g, 31.4 mmol) were combined in DCM (78 mL) and stirred at ambient temperature for 16 hours. The reaction was partitioned between water/DCM and the organics were washed with water (3×) and NaOH solution (lx), dried over sodium sulfate, filtered and evaporated in vacuo. Crude material was purified by reverse phase preparative chromatography to give desired Weinreb amide xiii. LC/MS (M+H)=370.4.

[chemical structure]

[0469] A solution of Weinreb amide xiii (4.3 g, 11.7 mmol) in THF (50 mL) was treated with nonylmagnesium bromide (23.4 mmol, 23.4 mL of a 1M solution) at ambient temperature. The reaction was quenched with ammonium chloride solution after 1 hour and partitioned between water and pentane. The organics were dried over sodium sulfate, filtered and evaporated in vacuo. This material was carried into next step crude.

[chemical structure]

[0470] Ketone xiv (5.1 g, 11.7 mmol) was treated with dimethylamine (29.3 mmol, 14.7 mL of a 2M solution in THF) and titanium(IV) isopropoxide (6.7 g, 23.5 mmol) and the reaction was stirred at ambient temperature for 16 hours. To the reaction mixture was added ethanol (50 mL) followed by sodium borohydride (0.67 g, 17.6 mmol). The reaction was loaded directly onto a silica column and purified by flash chromatography (0-15% MeOH/DCM). The material required a second purification by preparative reverse phase chromatography to give (11E,20Z,23Z)—N,N-dimethylnonacosa-11,20,23-trien-10-amine. HRMS calc'd 446.4720, found 446.4724. ¹H NMR (400 MHz, CDCl₃) δ 5.48 (m, 1H), 5.37 (m, 4H), 5.23 (m, 1H), 2.78 (t, 2H), 2.58 (m, 1H), 2.22 (s, 6H), 2.04 (m, 6H), 1.56 (m, 1H), 1.30 (m, 31H), 0.89 (m, 6H).

[0471] Compound 45 is DLinKC2DMA as described in Nature Biotechnology, 2010, 28, 172-176, WO 2010/042877 A1, WO 2010/048536 A2, WO 2010/088537 A2, and WO 2009/127060 A1.

[chemical structure]

[0472] Compound 46 is MC3 as described in WO 2010/054401, and WO 2010/144740 A1.

[chemical structure]

### E. Lipid Nanoparticle Compositions

[0473] The following lipid nanoparticle compositions (LNPs) of the instant invention are useful for the delivery of oligonucleotides, specifically siNA molecules of the invention:
[0474] Cationic Lipid/Cholesterol/PEG-DMG 56.6/38/5.4;
[0475] Cationic Lipid/Cholesterol/PEG-DMG 60/38/2;
[0476] Cationic Lipid/Cholesterol/PEG-DMG 67.3/29/3.7;
[0477] Cationic Lipid/Cholesterol/PEG-DMG 49.3/47/3.7;
[0478] Cationic Lipid/Cholesterol/PEG-DMG 50.3/44.3/5.4;
[0479] Cationic Lipid/Cholesterol/PEG-C-DMA/DSPC 40/48/2/10;
[0480] Cationic Lipid/Cholesterol/PEG-DMG/DSPC 40/48/2/10; and
[0481] Cationic Lipid/Cholesterol/PEG-DMG/DSPC 58/30/2/10.

[0482] One skilled in the art would readily appreciate that the present invention is well adapted to carry out the objects and obtain the ends and advantages mentioned, as well as those inherent therein. The methods and compositions described herein, as presently representative of preferred embodiments, are exemplary and are not intended as limitations on the scope of the invention. Changes therein and other uses will occur to those skilled in the art, which are encompassed within the spirit of the invention, are defined by the scope of the claims.

TABLE 7
PHD2 Accession Numbers

NM_022051- SEQ ID NO: 1055
Homo sapiens eg1 nine homolog 1 (C. elegans) (EGLN1), mRNA.
NM_022051.1 GI:13489072
NM_053207.2
Mus musculus EGL nine homolog 1 (C. elegans) (Egln1), mRNA.
NM_053207.2 GI:158303305
XM_001104870
PREDICTED: Macaca mulatta similar to egl nine homolog 1,
transcript variant 2 (LOC713410), mRNA.
XM_001104870.1 GI:109019983
NM_178334
Rattus norvegicus EGL nine homolog 1 (C. elegans) (Egln1), mRNA.
NM_178334.3 GI:158749629

TABLE 8
Non-limiting examples of Stabilization Chemistries
for chemically modified siNA constructs

| Chemistry | pyrimidine | purine | caps | p = S | Strand |
|---|---|---|---|---|---|
| “Stab 00” | Ribo | Ribo | TT at 3′-ends | | S/AS |
| “Stab 1” | Ribo | Ribo | — | 5 at 5′-end | S/AS |
| | | | | 1 at 3′-end | |
| “Stab 2” | Ribo | Ribo | — | All linkages | Usually AS |
| “Stab 3” | 2′-fluoro | Ribo | — | 4 at 5′-end | Usually S |
| | | | | 4 at 3′-end | |
| “Stab 4” | 2′-fluoro | Ribo | 5′ and 3′-ends | — | Usually S |
| “Stab 5” | 2′-fluoro | Ribo | — | 1 at 3′-end | Usually AS |
| “Stab 6” | 2′-O-Methyl | Ribo | 5′ and 3′-ends | — | Usually S |
| “Stab 7” | 2′-fluoro | 2′-deoxy | 5′ and 3′-ends | — | Usually S |
| “Stab 8” | 2′-fluoro | 2′-O-Methyl | — | 1 at 3′-end | S/AS |
| “Stab 9” | Ribo | Ribo | 5′ and 3′-ends | — | Usually S |
| “Stab 10” | Ribo | Ribo | — | 1 at 3′-end | Usually AS |
| “Stab 11” | 2′-fluoro | 2′-deoxy | — | 1 at 3′-end | Usually AS |
| “Stab 12” | 2′-fluoro | LNA | 5′ and 3′-ends | | Usually S |
| “Stab 13” | 2′-fluoro | LNA | | 1 at 3′-end | Usually AS |
| “Stab 14” | 2′-fluoro | 2′-deoxy | | 2 at 5′-end | Usually AS |
| | | | | 1 at 3′-end | |
| “Stab 15” | 2′-deoxy | 2′-deoxy | | 2 at 5′-end | Usually AS |
| | | | | 1 at 3′-end | |
| “Stab 16” | Ribo | 2′-O-Methyl | 5′ and 3′-ends | | Usually S |
| “Stab 17” | 2′-O-Methyl | 2′-O-Methyl | 5′ and 3′-ends | | Usually S |
| “Stab 18” | 2′-fluoro | 2′-O-Methyl | 5′ and 3′-ends | | Usually S |
| “Stab 19” | 2′-fluoro | 2′-O-Methyl | 3′-end | | S/AS |
| “Stab 20” | 2′-fluoro | 2′-deoxy | 3′-end | | Usually AS |
| “Stab 21” | 2′-fluoro | Ribo | 3′-end | | Usually AS |
| “Stab 22” | Ribo | Ribo | 3′-end | | Usually AS |
| “Stab 23” | 2′-fluoro* | 2′-deoxy* | 5′ and 3′-ends | | Usually S |
| “Stab 24” | 2′-fluoro* | 2′-O-Methyl* | — | 1 at 3′-end | S/AS |
| “Stab 25” | 2′-fluoro* | 2′-O-Methyl* | — | 1 at 3′-end | S/AS |
| “Stab 26” | 2′-fluoro* | 2′-O-Methyl* | — | | S/AS |
| “Stab 27” | 2′-fluoro* | 2′-O-Methyl* | 3′-end | | S/AS |
| “Stab 28” | 2′-fluoro* | 2′-O-Methyl* | 3′-end | | S/AS |
| “Stab 29” | 2′-fluoro* | 2′-O-Methyl* | | 1 at 3′-end | S/AS |
| “Stab 30” | 2′-fluoro* | 2′-O-Methyl* | | | S/AS |
| “Stab 31” | 2′-fluoro* | 2′-O-Methyl* | 3′-end | | S/AS |
| “Stab 32” | 2′-fluoro | 2′-O-Methyl | | | S/AS |
| “Stab 33” | 2′-fluoro | 2′-deoxy* | 5′ and 3′-ends | — | Usually S |
| “Stab 34” | 2′-fluoro | 2′-O-Methyl* | 5′ and 3′-ends | | Usually S |
| “Stab 35” | 2′-fluoro*† | 2′-O-Methyl*† | | | Usually AS |
| “Stab 36” | 2′-fluoro*† | 2′-O-Methyl*† | | | Usually AS |
| “Stab04H” | 2′-fluoro‡ | Ribo‡ | 5′ and 3′-ends | 1 at 3′-end | Ususally S |
| “Stab06C” | 2′-O-Methyl‡ | Ribo‡ | 5′ and 3′-ends | | Ususally S |
| “Stab07H” | 2′-fluoro‡ | 2′-deoxy‡ | 5′ and 3′-ends | 1 at 3′-end | Ususally S |
| “Stab07mU” | 2′-fluoro‡ | 2′-deoxy‡ | 5′ and 3′-ends | | Ususally S |
| “Stab09H” | Ribo‡ | Ribo‡ | 5′ and 3′-ends | 1 at 3′-end | Ususally S |
| “Stab16C” | Ribo‡ | 2′-O-Methyl‡ | 5′ and 3′-ends | | Ususally S |
| “Stab16H” | Ribo‡ | 2′-O-Methyl‡ | 5′ and 3′-ends | 1 at 3′-end | Ususally S |
| “Stab18C” | 2′-fluoro‡ | 2′-O-Methyl‡ | 5′ and 3′-ends | | Ususally S |
| “Stab18H” | 2′-fluoro‡ | 2′-O-Methyl‡ | 5′ and 3′-ends | 1 at 3′-end | Ususally S |
| “Stab52H” | 2′-O-Methyl‡ | Ribo‡ | 5′ and 3′-ends | 1 at 3′-end | Ususally S |
| “Stab05C” | 2′-fluoro‡ | Ribo‡ | | | Ususally AS |
| “Stab05N” | 2′-fluoro‡ | Ribo‡ | | 1 at 3′-end | Ususally AS |
| “Stab10C” | Ribo‡ | Ribo‡ | | | Ususally AS |
| “Stab10N” | Ribo‡ | Ribo‡ | | 1 at 3′-end | Ususally AS |
| “Stab35G*” | 2′-fluoro‡ | 2′-O-Methyl‡ | | | Ususally AS |
| “Stab35N*” | 2′-fluoro‡ | 2′-O-Methyl‡ | | 1 at 3′-end | Ususally AS |
| “Stab35rev*” | 2′-O-Methyl‡ | 2′-fluoro‡ | | | Ususally AS |
| “Stab50*” | Ribo‡ | 2′-O-Methyl‡ | | | Ususally AS |
| “Stab53*” | 2′-O-Methyl‡ | Ribo‡ | | | Ususally AS |
| “Stab53N*” | 2′-O-Methyl‡ | Ribo‡ | | 1 at 3′-end | Ususally AS |
| Stab54 | Ribo‡ | 2′-fluoro‡ | | | Ususally AS |

CAP = any terminal cap, see for example FIGS. 5A-5J.
All Stab chemistries can be used in combination with each other for duplexes of the invention (e.g., as combinations of sense and antisense strand chemistries), or alternately can be used in isolation, e.g., for single stranded nucleic acid molecules of the invention.
All Stab chemistries can comprise 3′-overhang nucleotides having 2′-O-alkyl, 2′-deoxy-2′-fluoro, 2′-deoxy, LNA or other modified nucleotides or non-nucleotides.
All Stab chemistries typically comprise about 19-21 nucleotides, but can vary as described herein.
All Stab chemistries can also include a single ribonucleotide in the sense or passenger strand at the 11^{th} base paired position of the double-stranded nucleic acid duplex as determined from the 5′-end of the antisense or guide strand.
All Stab chemistries can also have in place of the Stab designation above a 2′-deoxy-2′-fluoro modification at position 14 from the 5′ end of the antisense strand regardless of whether it is a purine or pyrimidine at that position.
All Stab chemistries of the antisense strand presented above can have a thymidine in place of a 2′-deoxy uridine at position 1, 2, and/or 3 from the 5′ end of the antisense strand.
S = sense strand.
AS = antisense strand
*Stab 23 has a single ribonucleotide adjacent to 3′-CAP.
*Stab 24 and Stab 28 have a single ribonucleotide at 5′-terminus.
*Stab 25, Stab 26, Stab 27, Stab 35, Stab 35G* Stab 35N* Stab 35rev*, Stab 36, Stab 50*, Stab53*, Stab 53N*, and Stab 54 have three ribonucleotides at 5′-terminus.
*Stab 29, Stab 30, Stab 31, Stab 33, and Stab 34 any purine at first three nucleotide positions from 5′-terminus are ribonucleotides.
p = phosphorothioate linkage.
†Stab 35 has 2′-O-methyl U at 3′-overhangs and three ribonucleotides at 5′-terminus.
†Stab 36 has 2′-O-methyl overhangs that are complementary to the target sequence, (naturally occurring overhangs) and three ribonucleotides at 5'-terminus.
‡Stab 04H, Stab 06C, Stabl07H, Stab07mU, Stab09H, Stab16C, Stab 16H, Stab18C, Stab 18H, Stab 52H, Stab 05C, Stab05N, Stab10C, Stab10N, Stab35G* Stab35N* Stab35N* Stab35rev* Stab 50*, Stab 53*, Stab 53N*, Stab 54 have two 2′-O-methyl U 3′-overhangs.
Stab35G*, Stab 35N*, Stab35rev*, Stab50*, Stab53*, and Stab53N* do not allow for a 2′-O-methyl modification at position 14 of the guide strand as determined from the 5′-end.

TABLE 9
Typical solid phase synthsis conditions

| | | | | | |
|---|---|---|---|---|---|
| | | | Wait | Wait | Wait |
| Reagent | Equivalents | Amount | Time* DNA | Time* 2′-O-methyl | Time*RNA |

A. 2.5 μmol Synthesis Cycle ABI 394 Instrument

| | | | | | | | | | |
|---|---|---|---|---|---|---|---|---|---|
| Phosphoramidites | 6.5 | 163 | μL | 45 | sec | 2.5 | min | 7.5 | min |
| S-Ethyl Tetrazole | 23.8 | 238 | μL | 45 | sec | 2.5 | min | 7.5 | min |
| Acetic Anhydride | 100 | 233 | μL | 5 | sec | 5 | sec | 5 | sec |
| N-HBVhyl Imidazole | 186 | 233 | μL | 5 | sec | 5 | sec | 5 | sec |
| TCA | 176 | 2.3 | mL | 21 | sec | 21 | sec | 21 | sec |
| Iodine | 11.2 | 1.7 | mL | 45 | sec | 45 | sec | 45 | sec |
| Beaucage | 12.9 | 645 | μL | 100 | sec | 300 | sec | 300 | sec |

| | | | | | | |
|---|---|---|---|---|---|---|
| Acetonitrile | NA | 6.67 | mL | NA | NA | NA |

B. 0.2 μmol Synthesis Cycle ABI 394 Instrument

| | | | | | | | | | |
|---|---|---|---|---|---|---|---|---|---|
| Phosphoramidites | 15 | 31 | μL | 45 | sec | 233 | sec | 465 | sec |
| S-Ethyl Tetrazole | 38.7 | 31 | μL | 45 | sec | 233 | min | 465 | sec |
| Acetic Anhydride | 655 | 124 | μL | 5 | sec | 5 | sec | 5 | sec |
| N-HBVhyl Imidazole | 1245 | 124 | μL | 5 | sec | 5 | sec | 5 | sec |
| TCA | 700 | 732 | μL | 10 | sec | 10 | sec | 10 | sec |
| Iodine | 20.6 | 244 | μL | 15 | sec | 15 | sec | 15 | sec |
| Beaucage | 7.7 | 232 | μL | 100 | sec | 300 | sec | 300 | sec |

| | | | | | | |
|---|---|---|---|---|---|---|
| Acetonitrile | NA | 2.64 | mL | NA | NA | NA |

C. 0.2 μmol Synthesis Cycle 96 well Instrument

| | Equivalents: | Amount: | | | | | | |
|---|---|---|---|---|---|---|---|---|
| | DNA/2′-O- | DNA/2′-O- | | Wait | Wait | | Wait | |
| Reagent | methyl/Ribo | methyl/Ribo | | Time* DNA | Time* 2′-O-methyl | | Time* Ribo | |
| Phosphoramidites | 22/33/66 | 40/60/120 | μL | 60 sec | 180 | sec | 360 | sec |
| S-Ethyl Tetrazole | 70/105/210 | 40/60/120 | μL | 60 sec | 180 | min | 360 | sec |
| Acetic Anhydride | 265/265/265 | 50/50/50 | μL | 10 sec | 10 | sec | 10 | sec |
| N-HBVhyl Imidazole | 502/502/502 | 50/50/50 | μL | 10 sec | 10 | sec | 10 | sec |
| TCA | 238/475/475 | 250/500/500 | μL | 15 sec | 15 | sec | 15 | sec |
| Iodine | 6.8/6.8/6.8 | 80/80/80 | μL | 30 sec | 30 | sec | 30 | sec |
| Beaucage | 34/51/51 | 80/120/120 | | 100 sec | 200 | sec | 200 | sec |

| | | | | | | |
|---|---|---|---|---|---|---|
| Acetonitrile | NA | 1150/1150/1150 | μL | NA | NA | NA |

Wait time does not include contact time during delivery.
Tandem synthesis utilizes double coupling of linker molecule

TABLE 10
Composition of Select Lipid Nanoparticle Formulations

| LNP Identifier | Lipid Components and Molar Ratios | | | | siNA Duplex | N/P |
|---|---|---|---|---|---|---|
| LNP-1 | Compound 32 | Cholesterol | DSPC | PEG-DMG | R-008039846-001E | 6 |
| | (50%) | (30%) | (10%) | (2%) | | |
| LNP-2 | Compound 32 | Cholesterol | DSPC | PEG-DMG | R-008039847-001N | 6 |
| | (50%) | (30%) | (10%) | (2%) | | |
| LNP-3 | Compound 32 | Cholesterol | DSPC | PEG-DMG | R-008039882-001P | 6 |
| | (50%) | (30%) | (10%) | (2%) | | |
| LNP-4 | Compound 32 | Cholesterol | DSPC | PEG-DMG | R-008039848-001X | 6 |
| | (50%) | (30%) | (10%) | (2%) | | |
| LNP-5 | Compound 32 | Cholesterol | DSPC | PEG-DMG | R-008039849-001F | 6 |
| | (50%) | (30%) | (10%) | (2%) | | |
| LNP-6 | Compound 32 | Cholesterol | DSPC | PEG-DMG | R-008053961-001S | 6 |
| | (50%) | (30%) | (10%) | (2%) | | |
| LNP-7 | Compound 32 | Cholesterol | DSPC | PEG-DMG | R-008054086-001B | 6 |
| | (50%) | (30%) | (10%) | (2%) | | |
| LNP-8 | Compound 32 | Cholesterol | DSPC | PEG-DMG | R-008147454-000S | 6 |
| | (50%) | (30%) | (10%) | (2%) | | |

N/P ratio = Nitrogen:Phosphorous ratio between cationic lipid and nucleic acid

TABLE 11
Chemical Structures of Lipids in Formulations of Table 10

| Lipid | Chemical Structure |
|---|---|
| Compound 32 | [chemical structure] |
| Cholesterol | [chemical structure] |
| DSPC | [chemical structure] |
| PEG-DMG | [chemical structure] |

1. A double-stranded short interfering nucleic acid (siNA) molecule comprising R-008039846-001E, R-008039847-001N, R-008039882-001P, R-008039848-01X, R-008039849-001F, R-008053961-001S, R-008054086-001B, R-008147454-000S or any combination thereof.

2. A composition comprising the siNA molecule of claim 1 and a pharmaceutically acceptable carrier or diluent.

3. A composition comprising:
(a) the siNA molecule of claim 1;
(b) a cationic lipid;
(c) cholesterol;
(d) DSPC; and
(e) PEG-DMG.

4. A composition comprising:
(a) the siNA molecule of claim 1;
(b) (13Z,16Z)—N,N-dimethyl-3-nonyldocosa-13,16-dien-1-amine;
(c) cholesterol;
(d) DSPC; and
(e) PEG-DMG.

5. The composition according to claim 4, wherein the (13Z,16Z)—N,N-dimethyl-3-nonyldocosa-13,16-dien-1-amine, cholesterol, DSPC, and PEG-DMG have a molar ratio of 50:30:10:2 respectively.

6. A composition comprising the composition according to claim 5 and a pharmaceutically acceptable carrier or diluent.

7. A method of treating a human subject suffering from a condition which is mediated by the action, or by loss of action, of PHD2, which comprises administering to said subject an effective amount of R-008039846-001E, R-008039847-001N, R-008039882-001P, R-008039848-001X, R-008039849-001F, R-008053961-001S, R-008054086-001B, R-008147454-000S or any combination thereof.

8. The method according to claim 7, wherein the condition is anemia.

9. The method according to claim 7, further comprising administration of a chemotherapeutic agent.

10. A kit comprising R-008039846-001E, R-008039847-001N, R-008039882-001P, R-008039848-001X, R-008039849-001F, R-008053961-001S, R-008054086-001B, R-008147454-000S or any combination thereof.

11-17. (canceled)

18. The method according to claim 7, wherein the condition is anemia.

19. The method according to claim 7, further comprising administration of a chemotherapeutic agent.

20. (canceled)

The application's sequence listing, which the Patent Office published only in electronic form, follows.

SEQUENCE LISTING (1070 sequences)

SEQ ID NO: 1 - RNA, 19 nt, synthetic construct
  misc_feature 1..19: note = Synthetic
  source 1..19: mol_type = other RNA
gatgtgtgacatgtatata

SEQ ID NO: 2 - RNA, 19 nt, synthetic construct
  misc_feature 1..19: note = Synthetic
  source 1..19: mol_type = other RNA
gttatgtacgtcatgttga

SEQ ID NO: 3 - RNA, 19 nt, synthetic construct
  misc_feature 1..19: note = Synthetic
  source 1..19: mol_type = other RNA
gtcatgttgataatccaaa

SEQ ID NO: 4 - RNA, 19 nt, synthetic construct
  misc_feature 1..19: note = Synthetic
  source 1..19: mol_type = other RNA
gtgtgacatgtatatatta

SEQ ID NO: 5 - RNA, 19 nt, synthetic construct
  misc_feature 1..19: note = Synthetic
  source 1..19: mol_type = other RNA
tgttgataatccaaatgga

SEQ ID NO: 6 - RNA, 19 nt, synthetic construct
  misc_feature 1..19: note = Synthetic
  source 1..19: mol_type = other RNA
aacgggttatgtacgtcat

SEQ ID NO: 7 - RNA, 19 nt, synthetic construct
  misc_feature 1..19: note = Synthetic
  source 1..19: mol_type = other RNA
gatggaagatgtgtgacat

SEQ ID NO: 8 - RNA, 19 nt, synthetic construct
  misc_feature 1..19: note = Synthetic
  source 1..19: mol_type = other RNA
tgtgtgacatgtatatatt

SEQ ID NO: 9 - RNA, 19 nt, synthetic construct
  misc_feature 1..19: note = Synthetic
  source 1..19: mol_type = other RNA
ggaagatgtgtgacatgta

SEQ ID NO: 10 - RNA, 19 nt, synthetic construct
  misc_feature 1..19: note = Synthetic
  source 1..19: mol_type = other RNA
catgtatatattatcttaa

SEQ ID NO: 11 - RNA, 19 nt, synthetic construct
  misc_feature 1..19: note = Synthetic
  source 1..19: mol_type = other RNA
ttgataatccaaatggaga

SEQ ID NO: 12 - RNA, 19 nt, synthetic construct
  misc_feature 1..19: note = Synthetic
  source 1..19: mol_type = other RNA
acgtcatgttgataatcca

SEQ ID NO: 13 - RNA, 19 nt, synthetic construct
  misc_feature 1..19: note = Synthetic
  source 1..19: mol_type = other RNA
tggaagatgtgtgacatgt

SEQ ID NO: 14 - RNA, 19 nt, synthetic construct
  misc_feature 1..19: note = Synthetic
  source 1..19: mol_type = other RNA
aagccatggttgcttgtta

SEQ ID NO: 15 - RNA, 19 nt, synthetic construct
  misc_feature 1..19: note = Synthetic
  source 1..19: mol_type = other RNA
caatggaacgggttatgta

SEQ ID NO: 16 - RNA, 19 nt, synthetic construct
  misc_feature 1..19: note = Synthetic
  source 1..19: mol_type = other RNA
gacgtcttctagagccttt

SEQ ID NO: 17 - RNA, 19 nt, synthetic construct
  misc_feature 1..19: note = Synthetic
  source 1..19: mol_type = other RNA
gacatgtatatattatctt

SEQ ID NO: 18 - RNA, 19 nt, synthetic construct
  misc_feature 1..19: note = Synthetic
  source 1..19: mol_type = other RNA
gtcgcaaccctcatgaagt

SEQ ID NO: 19 - RNA, 19 nt, synthetic construct
  misc_feature 1..19: note = Synthetic
  source 1..19: mol_type = other RNA
tacgtcatgttgataatcc

SEQ ID NO: 20 - RNA, 19 nt, synthetic construct
  misc_feature 1..19: note = Synthetic
  source 1..19: mol_type = other RNA
gggttatgtacgtcatgtt

SEQ ID NO: 21 - RNA, 19 nt, synthetic construct
  misc_feature 1..19: note = Synthetic
  source 1..19: mol_type = other RNA
gttgaactcaataaacctt

SEQ ID NO: 22 - RNA, 19 nt, synthetic construct
  misc_feature 1..19: note = Synthetic
  source 1..19: mol_type = other RNA
gaagatgtgtgacatgtat

SEQ ID NO: 23 - RNA, 19 nt, synthetic construct
  misc_feature 1..19: note = Synthetic
  source 1..19: mol_type = other RNA
acgaaagccatggttgctt

SEQ ID NO: 24 - RNA, 19 nt, synthetic construct
  misc_feature 1..19: note = Synthetic
  source 1..19: mol_type = other RNA
tgtatatattatcttaata

SEQ ID NO: 25 - RNA, 19 nt, synthetic construct
  misc_feature 1..19: note = Synthetic
  source 1..19: mol_type = other RNA
gcaataactgtttggtatt

SEQ ID NO: 26 - RNA, 19 nt, synthetic construct
  misc_feature 1..19: note = Synthetic
  source 1..19: mol_type = other RNA
tgctgacattgaacccaaa

SEQ ID NO: 27 - RNA, 19 nt, synthetic construct
  misc_feature 1..19: note = Synthetic
  source 1..19: mol_type = other RNA
cgaaagccatggttgcttg

SEQ ID NO: 28 - RNA, 19 nt, synthetic construct
  misc_feature 1..19: note = Synthetic
  source 1..19: mol_type = other RNA
tggaggtatacttcgaatt

SEQ ID NO: 29 - RNA, 19 nt, synthetic construct
  misc_feature 1..19: note = Synthetic
  source 1..19: mol_type = other RNA
cgggcaatggaacgggtta

SEQ ID NO: 30 - RNA, 19 nt, synthetic construct
  misc_feature 1..19: note = Synthetic
  source 1..19: mol_type = other RNA
agccatggttgcttgttat

SEQ ID NO: 31 - RNA, 19 nt, synthetic construct
  misc_feature 1..19: note = Synthetic
  source 1..19: mol_type = other RNA
tcgcaaccctcatgaagta

SEQ ID NO: 32 - RNA, 19 nt, synthetic construct
  misc_feature 1..19: note = Synthetic
  source 1..19: mol_type = other RNA
agcctttgatccagcaata

SEQ ID NO: 33 - RNA, 19 nt, synthetic construct
  misc_feature 1..19: note = Synthetic
  source 1..19: mol_type = other RNA
cattgaacccaaatttgat

SEQ ID NO: 34 - RNA, 19 nt, synthetic construct
  misc_feature 1..19: note = Synthetic
  source 1..19: mol_type = other RNA
gactgggatgccaaggtaa

SEQ ID NO: 35 - RNA, 19 nt, synthetic construct
  misc_feature 1..19: note = Synthetic
  source 1..19: mol_type = other RNA
gtattttgatgcagatgag

SEQ ID NO: 36 - RNA, 19 nt, synthetic construct
  misc_feature 1..19: note = Synthetic
  source 1..19: mol_type = other RNA
ttgctgacattgaacccaa

SEQ ID NO: 37 - RNA, 19 nt, synthetic construct
  misc_feature 1..19: note = Synthetic
  source 1..19: mol_type = other RNA
gtgtgagggttgaactcaa

SEQ ID NO: 38 - RNA, 19 nt, synthetic construct
  misc_feature 1..19: note = Synthetic
  source 1..19: mol_type = other RNA
cgggttatgtacgtcatgt

SEQ ID NO: 39 - RNA, 19 nt, synthetic construct
  misc_feature 1..19: note = Synthetic
  source 1..19: mol_type = other RNA
cgtcatgttgataatccaa

SEQ ID NO: 40 - RNA, 19 nt, synthetic construct
  misc_feature 1..19: note = Synthetic
  source 1..19: mol_type = other RNA
gtgactttgtactgcatga

SEQ ID NO: 41 - RNA, 19 nt, synthetic construct
  misc_feature 1..19: note = Synthetic
  source 1..19: mol_type = other RNA
aaggtaagtggaggtatac

SEQ ID NO: 42 - RNA, 19 nt, synthetic construct
  misc_feature 1..19: note = Synthetic
  source 1..19: mol_type = other RNA
gctacaaggtacgcaataa

SEQ ID NO: 43 - RNA, 19 nt, synthetic construct
  misc_feature 1..19: note = Synthetic
  source 1..19: mol_type = other RNA
aaggtgtgagggttgaact

SEQ ID NO: 44 - RNA, 19 nt, synthetic construct
  misc_feature 1..19: note = Synthetic
  source 1..19: mol_type = other RNA
caagtttgaatttgggata

SEQ ID NO: 45 - RNA, 19 nt, synthetic construct
  misc_feature 1..19: note = Synthetic
  source 1..19: mol_type = other RNA
gcaaccctcatgaagtaca

SEQ ID NO: 46 - RNA, 19 nt, synthetic construct
  misc_feature 1..19: note = Synthetic
  source 1..19: mol_type = other RNA
aacccaaatttgatagact

SEQ ID NO: 47 - RNA, 19 nt, synthetic construct
  misc_feature 1..19: note = Synthetic
  source 1..19: mol_type = other RNA
cgcaataactgtttggtat

SEQ ID NO: 48 - RNA, 19 nt, synthetic construct
  misc_feature 1..19: note = Synthetic
  source 1..19: mol_type = other RNA
gatgagagagcacgagcta

SEQ ID NO: 49 - RNA, 19 nt, synthetic construct
  misc_feature 1..19: note = Synthetic
  source 1..19: mol_type = other RNA
ttatgtacgtcatgttgat

SEQ ID NO: 50 - RNA, 19 nt, synthetic construct
  misc_feature 1..19: note = Synthetic
  source 1..19: mol_type = other RNA
gagagcacgagctaaagta

SEQ ID NO: 51 - RNA, 19 nt, synthetic construct
  misc_feature 1..19: note = Synthetic
  source 1..19: mol_type = other RNA
ctcatgaagtacaaccagc

SEQ ID NO: 52 - RNA, 19 nt, synthetic construct
  misc_feature 1..19: note = Synthetic
  source 1..19: mol_type = other RNA
atgctacaaggtacgcaat

SEQ ID NO: 53 - RNA, 19 nt, synthetic construct
  misc_feature 1..19: note = Synthetic
  source 1..19: mol_type = other RNA
ctgacattgaacccaaatt

SEQ ID NO: 54 - RNA, 19 nt, synthetic construct
  misc_feature 1..19: note = Synthetic
  source 1..19: mol_type = other RNA
agcccagtttgctgacatt

SEQ ID NO: 55 - RNA, 19 nt, synthetic construct
  misc_feature 1..19: note = Synthetic
  source 1..19: mol_type = other RNA
gcccagtttgctgacattg

SEQ ID NO: 56 - RNA, 19 nt, synthetic construct
  misc_feature 1..19: note = Synthetic
  source 1..19: mol_type = other RNA
gcccggctgcgaaaccatt

SEQ ID NO: 57 - RNA, 19 nt, synthetic construct
  misc_feature 1..19: note = Synthetic
  source 1..19: mol_type = other RNA
ggtacaatttatctaaact

SEQ ID NO: 58 - RNA, 19 nt, synthetic construct
  misc_feature 1..19: note = Synthetic
  source 1..19: mol_type = other RNA
caaccctcatgaagtacaa

SEQ ID NO: 59 - RNA, 19 nt, synthetic construct
  misc_feature 1..19: note = Synthetic
  source 1..19: mol_type = other RNA
cttctagagcctttgatcc

SEQ ID NO: 60 - RNA, 19 nt, synthetic construct
  misc_feature 1..19: note = Synthetic
  source 1..19: mol_type = other RNA
ggacgaaagccatggttgc

SEQ ID NO: 61 - RNA, 19 nt, synthetic construct
  misc_feature 1..19: note = Synthetic
  source 1..19: mol_type = other RNA
gggttgaactcaataaacc

SEQ ID NO: 62 - RNA, 19 nt, synthetic construct
  misc_feature 1..19: note = Synthetic
  source 1..19: mol_type = other RNA
gcgataagatcacctggat

SEQ ID NO: 63 - RNA, 19 nt, synthetic construct
  misc_feature 1..19: note = Synthetic
  source 1..19: mol_type = other RNA
tgtgagggttgaactcaat

SEQ ID NO: 64 - RNA, 19 nt, synthetic construct
  misc_feature 1..19: note = Synthetic
  source 1..19: mol_type = other RNA
tctatattaggtacaattt

SEQ ID NO: 65 - RNA, 19 nt, synthetic construct
  misc_feature 1..19: note = Synthetic
  source 1..19: mol_type = other RNA
tatgctacaaggtacgcaa

SEQ ID NO: 66 - RNA, 19 nt, synthetic construct
  misc_feature 1..19: note = Synthetic
  source 1..19: mol_type = other RNA
tcggtaaagacgtcttcta

SEQ ID NO: 67 - RNA, 19 nt, synthetic construct
  misc_feature 1..19: note = Synthetic
  source 1..19: mol_type = other RNA
gtggaggtatacttcgaat

SEQ ID NO: 68 - RNA, 19 nt, synthetic construct
  misc_feature 1..19: note = Synthetic
  source 1..19: mol_type = other RNA
agagcacgagctaaagtaa

SEQ ID NO: 69 - RNA, 19 nt, synthetic construct
  misc_feature 1..19: note = Synthetic
  source 1..19: mol_type = other RNA
gagagagcacgagctaaag

SEQ ID NO: 70 - RNA, 19 nt, synthetic construct
  misc_feature 1..19: note = Synthetic
  source 1..19: mol_type = other RNA
gagggttgaactcaataaa

SEQ ID NO: 71 - RNA, 19 nt, synthetic construct
  misc_feature 1..19: note = Synthetic
  source 1..19: mol_type = other RNA
acccaaatttgatagactg

SEQ ID NO: 72 - RNA, 19 nt, synthetic construct
  misc_feature 1..19: note = Synthetic
  source 1..19: mol_type = other RNA
gttgcttgttatccgggca

SEQ ID NO: 73 - RNA, 19 nt, synthetic construct
  misc_feature 1..19: note = Synthetic
  source 1..19: mol_type = other RNA
agatgtgtgacatgtatat

SEQ ID NO: 74 - RNA, 19 nt, synthetic construct
  misc_feature 1..19: note = Synthetic
  source 1..19: mol_type = other RNA
cacggcatctgtgtggtgg

SEQ ID NO: 75 - RNA, 19 nt, synthetic construct
  misc_feature 1..19: note = Synthetic
  source 1..19: mol_type = other RNA
acgcaataactgtttggta

SEQ ID NO: 76 - RNA, 19 nt, synthetic construct
  misc_feature 1..19: note = Synthetic
  source 1..19: mol_type = other RNA
gtgacatgtatatattatc

SEQ ID NO: 77 - RNA, 19 nt, synthetic construct
  misc_feature 1..19: note = Synthetic
  source 1..19: mol_type = other RNA
ataagtgccctgtgtagaa

SEQ ID NO: 78 - RNA, 19 nt, synthetic construct
  misc_feature 1..19: note = Synthetic
  source 1..19: mol_type = other RNA
cgtgccgtgcatgaacaag

SEQ ID NO: 79 - RNA, 19 nt, synthetic construct
  misc_feature 1..19: note = Synthetic
  source 1..19: mol_type = other RNA
ctaaagtaaaatatctaac

SEQ ID NO: 80 - RNA, 19 nt, synthetic construct
  misc_feature 1..19: note = Synthetic
  source 1..19: mol_type = other RNA
atgagagagcacgagctaa

SEQ ID NO: 81 - RNA, 19 nt, synthetic construct
  misc_feature 1..19: note = Synthetic
  source 1..19: mol_type = other RNA
agtgccctgtgtagaattt

SEQ ID NO: 82 - RNA, 19 nt, synthetic construct
  misc_feature 1..19: note = Synthetic
  source 1..19: mol_type = other RNA
ggcaatggaacgggttatg

SEQ ID NO: 83 - RNA, 19 nt, synthetic construct
  misc_feature 1..19: note = Synthetic
  source 1..19: mol_type = other RNA
atgtatatattatcttaat

SEQ ID NO: 84 - RNA, 19 nt, synthetic construct
  misc_feature 1..19: note = Synthetic
  source 1..19: mol_type = other RNA
agtacatcgtgccgtgcat

SEQ ID NO: 85 - RNA, 19 nt, synthetic construct
  misc_feature 1..19: note = Synthetic
  source 1..19: mol_type = other RNA
caaaataacatcaatctat

SEQ ID NO: 86 - RNA, 19 nt, synthetic construct
  misc_feature 1..19: note = Synthetic
  source 1..19: mol_type = other RNA
gccactgtaacgggaagct

SEQ ID NO: 87 - RNA, 19 nt, synthetic construct
  misc_feature 1..19: note = Synthetic
  source 1..19: mol_type = other RNA
gcactttaattacaactga

SEQ ID NO: 88 - RNA, 19 nt, synthetic construct
  misc_feature 1..19: note = Synthetic
  source 1..19: mol_type = other RNA
cgctgaagctggcgctcga

SEQ ID NO: 89 - RNA, 19 nt, synthetic construct
  misc_feature 1..19: note = Synthetic
  source 1..19: mol_type = other RNA
aaggtacgcaataactgtt

SEQ ID NO: 90 - RNA, 19 nt, synthetic construct
  misc_feature 1..19: note = Synthetic
  source 1..19: mol_type = other RNA
ggttgaactcaataaacct

SEQ ID NO: 91 - RNA, 19 nt, synthetic construct
  misc_feature 1..19: note = Synthetic
  source 1..19: mol_type = other RNA
atcgtgccgtgcatgaaca

SEQ ID NO: 92 - RNA, 19 nt, synthetic construct
  misc_feature 1..19: note = Synthetic
  source 1..19: mol_type = other RNA
tagacaaccagttcgcatt

SEQ ID NO: 93 - RNA, 19 nt, synthetic construct
  misc_feature 1..19: note = Synthetic
  source 1..19: mol_type = other RNA
ggaggtatacttcgaattt

SEQ ID NO: 94 - RNA, 19 nt, synthetic construct
  misc_feature 1..19: note = Synthetic
  source 1..19: mol_type = other RNA
gtgccgtgcatgaacaagc

SEQ ID NO: 95 - RNA, 19 nt, synthetic construct
  misc_feature 1..19: note = Synthetic
  source 1..19: mol_type = other RNA
caaggagcccggctgcgaa

SEQ ID NO: 96 - RNA, 19 nt, synthetic construct
  misc_feature 1..19: note = Synthetic
  source 1..19: mol_type = other RNA
gcaaggagcccggctgcga

SEQ ID NO: 97 - RNA, 19 nt, synthetic construct
  misc_feature 1..19: note = Synthetic
  source 1..19: mol_type = other RNA
ccgggcaatggaacgggtt

SEQ ID NO: 98 - RNA, 19 nt, synthetic construct
  misc_feature 1..19: note = Synthetic
  source 1..19: mol_type = other RNA
accagcatatgctacaagg

SEQ ID NO: 99 - RNA, 19 nt, synthetic construct
  misc_feature 1..19: note = Synthetic
  source 1..19: mol_type = other RNA
cctcttaataatgattgtt

SEQ ID NO: 100 - RNA, 19 nt, synthetic construct
  misc_feature 1..19: note = Synthetic
  source 1..19: mol_type = other RNA
gactttgtactgcatgatc

SEQ ID NO: 101 - RNA, 19 nt, synthetic construct
  misc_feature 1..19: note = Synthetic
  source 1..19: mol_type = other RNA
caaggtacgcaataactgt

SEQ ID NO: 102 - RNA, 19 nt, synthetic construct
  misc_feature 1..19: note = Synthetic
  source 1..19: mol_type = other RNA
gagcccggctgcgaaacca

SEQ ID NO: 103 - RNA, 19 nt, synthetic construct
  misc_feature 1..19: note = Synthetic
  source 1..19: mol_type = other RNA
agggttgaactcaataaac

SEQ ID NO: 104 - RNA, 19 nt, synthetic construct
  misc_feature 1..19: note = Synthetic
  source 1..19: mol_type = other RNA
gtacaaccagcatatgcta

SEQ ID NO: 105 - RNA, 19 nt, synthetic construct
  misc_feature 1..19: note = Synthetic
  source 1..19: mol_type = other RNA
cggacgaaagccatggttg

SEQ ID NO: 106 - RNA, 19 nt, synthetic construct
  misc_feature 1..19: note = Synthetic
  source 1..19: mol_type = other RNA
gactctacttgtatttaaa

SEQ ID NO: 107 - RNA, 19 nt, synthetic construct
  misc_feature 1..19: note = Synthetic
  source 1..19: mol_type = other RNA
acgacttcctcggcaagga

SEQ ID NO: 108 - RNA, 19 nt, synthetic construct
  misc_feature 1..19: note = Synthetic
  source 1..19: mol_type = other RNA
gccagtgactgatgattaa

SEQ ID NO: 109 - RNA, 19 nt, synthetic construct
  misc_feature 1..19: note = Synthetic
  source 1..19: mol_type = other RNA
gccaaggtaagtggaggta

SEQ ID NO: 110 - RNA, 19 nt, synthetic construct
  misc_feature 1..19: note = Synthetic
  source 1..19: mol_type = other RNA
ggtgtgagggttgaactca

SEQ ID NO: 111 - RNA, 19 nt, synthetic construct
  misc_feature 1..19: note = Synthetic
  source 1..19: mol_type = other RNA
gagcacgagctaaagtaaa

SEQ ID NO: 112 - RNA, 19 nt, synthetic construct
  misc_feature 1..19: note = Synthetic
  source 1..19: mol_type = other RNA
aatttgatagactgctgtt

SEQ ID NO: 113 - RNA, 19 nt, synthetic construct
  misc_feature 1..19: note = Synthetic
  source 1..19: mol_type = other RNA
gccatggttgcttgttatc

SEQ ID NO: 114 - RNA, 19 nt, synthetic construct
  misc_feature 1..19: note = Synthetic
  source 1..19: mol_type = other RNA
ccgtcgcaaccctcatgaa

SEQ ID NO: 115 - RNA, 19 nt, synthetic construct
  misc_feature 1..19: note = Synthetic
  source 1..19: mol_type = other RNA
cagcatatgctacaaggta

SEQ ID NO: 116 - RNA, 19 nt, synthetic construct
  misc_feature 1..19: note = Synthetic
  source 1..19: mol_type = other RNA
aggtgtgagggttgaactc

SEQ ID NO: 117 - RNA, 19 nt, synthetic construct
  misc_feature 1..19: note = Synthetic
  source 1..19: mol_type = other RNA
gagctaaagtaaaatatct

SEQ ID NO: 118 - RNA, 19 nt, synthetic construct
  misc_feature 1..19: note = Synthetic
  source 1..19: mol_type = other RNA
cgggaagctgggcagctac

SEQ ID NO: 119 - RNA, 19 nt, synthetic construct
  misc_feature 1..19: note = Synthetic
  source 1..19: mol_type = other RNA
ggttgcttgttatccgggc

SEQ ID NO: 120 - RNA, 19 nt, synthetic construct
  misc_feature 1..19: note = Synthetic
  source 1..19: mol_type = other RNA
tacaatttatctaaactga

SEQ ID NO: 121 - RNA, 19 nt, synthetic construct
  misc_feature 1..19: note = Synthetic
  source 1..19: mol_type = other RNA
gacttcctcggcaaggaga

SEQ ID NO: 122 - RNA, 19 nt, synthetic construct
  misc_feature 1..19: note = Synthetic
  source 1..19: mol_type = other RNA
ccattgggctgctcatgag

SEQ ID NO: 123 - RNA, 19 nt, synthetic construct
  misc_feature 1..19: note = Synthetic
  source 1..19: mol_type = other RNA
gagcactttaattacaact

SEQ ID NO: 124 - RNA, 19 nt, synthetic construct
  misc_feature 1..19: note = Synthetic
  source 1..19: mol_type = other RNA
aaggagcccggctgcgaaa

SEQ ID NO: 125 - RNA, 19 nt, synthetic construct
  misc_feature 1..19: note = Synthetic
  source 1..19: mol_type = other RNA
acatgtatatattatctta

SEQ ID NO: 126 - RNA, 19 nt, synthetic construct
  misc_feature 1..19: note = Synthetic
  source 1..19: mol_type = other RNA
gtaagtggaggtatacttc

SEQ ID NO: 127 - RNA, 19 nt, synthetic construct
  misc_feature 1..19: note = Synthetic
  source 1..19: mol_type = other RNA
acgggaagctgggcagcta

SEQ ID NO: 128 - RNA, 19 nt, synthetic construct
  misc_feature 1..19: note = Synthetic
  source 1..19: mol_type = other RNA
gtgcgcgccctgcacgaca

SEQ ID NO: 129 - RNA, 19 nt, synthetic construct
  misc_feature 1..19: note = Synthetic
  source 1..19: mol_type = other RNA
cggcccaacgggcagacga

SEQ ID NO: 130 - RNA, 19 nt, synthetic construct
  misc_feature 1..19: note = Synthetic
  source 1..19: mol_type = other RNA
cgtcgcaaccctcatgaag

SEQ ID NO: 131 - RNA, 19 nt, synthetic construct
  misc_feature 1..19: note = Synthetic
  source 1..19: mol_type = other RNA
gtctctgagtgtagtatga

SEQ ID NO: 132 - RNA, 19 nt, synthetic construct
  misc_feature 1..19: note = Synthetic
  source 1..19: mol_type = other RNA
caaggtaagtggaggtata

SEQ ID NO: 133 - RNA, 19 nt, synthetic construct
  misc_feature 1..19: note = Synthetic
  source 1..19: mol_type = other RNA
tcttctagagcctttgatc

SEQ ID NO: 134 - RNA, 19 nt, synthetic construct
  misc_feature 1..19: note = Synthetic
  source 1..19: mol_type = other RNA
cgccctgcacgacaccggg

SEQ ID NO: 135 - RNA, 19 nt, synthetic construct
  misc_feature 1..19: note = Synthetic
  source 1..19: mol_type = other RNA
cgtgcatgaacaagcacgg

SEQ ID NO: 136 - RNA, 19 nt, synthetic construct
  misc_feature 1..19: note = Synthetic
  source 1..19: mol_type = other RNA
catccgcgcagcacagatt

SEQ ID NO: 137 - RNA, 19 nt, synthetic construct
  misc_feature 1..19: note = Synthetic
  source 1..19: mol_type = other RNA
ggctgctcatgagcagcat

SEQ ID NO: 138 - RNA, 19 nt, synthetic construct
  misc_feature 1..19: note = Synthetic
  source 1..19: mol_type = other RNA
ccctgcacgacaccgggaa

SEQ ID NO: 139 - RNA, 19 nt, synthetic construct
  misc_feature 1..19: note = Synthetic
  source 1..19: mol_type = other RNA
ggcagctggtcagccagaa

SEQ ID NO: 140 - RNA, 19 nt, synthetic construct
  misc_feature 1..19: note = Synthetic
  source 1..19: mol_type = other RNA
ggttatgtacgtcatgttg

SEQ ID NO: 141 - RNA, 19 nt, synthetic construct
  misc_feature 1..19: note = Synthetic
  source 1..19: mol_type = other RNA
ggcccaacgggcagacgaa

SEQ ID NO: 142 - RNA, 19 nt, synthetic construct
  misc_feature 1..19: note = Synthetic
  source 1..19: mol_type = other RNA
gggaagctgggcagctaca

SEQ ID NO: 143 - RNA, 19 nt, synthetic construct
  misc_feature 1..19: note = Synthetic
  source 1..19: mol_type = other RNA
ggaagctgggcagctacaa

SEQ ID NO: 144 - RNA, 19 nt, synthetic construct
  misc_feature 1..19: note = Synthetic
  source 1..19: mol_type = other RNA
gtattagactctacttgta

SEQ ID NO: 145 - RNA, 19 nt, synthetic construct
  misc_feature 1..19: note = Synthetic
  source 1..19: mol_type = other RNA
aaaccattgggctgctcat

SEQ ID NO: 146 - RNA, 19 nt, synthetic construct
  misc_feature 1..19: note = Synthetic
  source 1..19: mol_type = other RNA
gggctgctcatgagcagca

SEQ ID NO: 147 - RNA, 19 nt, synthetic construct
  misc_feature 1..19: note = Synthetic
  source 1..19: mol_type = other RNA
gcgcaagagattggattaa

SEQ ID NO: 148 - RNA, 19 nt, synthetic construct
  misc_feature 1..19: note = Synthetic
  source 1..19: mol_type = other RNA
ttccgttaaagtttaaata

SEQ ID NO: 149 - RNA, 19 nt, synthetic construct
  misc_feature 1..19: note = Synthetic
  source 1..19: mol_type = other RNA
cagggcttcttgaaataga

SEQ ID NO: 150 - RNA, 19 nt, synthetic construct
  misc_feature 1..19: note = Synthetic
  source 1..19: mol_type = other RNA
tcgtgccgtgcatgaacaa

SEQ ID NO: 151 - RNA, 19 nt, synthetic construct
  misc_feature 1..19: note = Synthetic
  source 1..19: mol_type = other RNA
aggtgcgcgccctgcacga

SEQ ID NO: 152 - RNA, 19 nt, synthetic construct
  misc_feature 1..19: note = Synthetic
  source 1..19: mol_type = other RNA
gaaaccattgggctgctca

SEQ ID NO: 153 - RNA, 19 nt, synthetic construct
  misc_feature 1..19: note = Synthetic
  source 1..19: mol_type = other RNA
tgcggcccaacgggcagac

SEQ ID NO: 154 - RNA, 19 nt, synthetic construct
  misc_feature 1..19: note = Synthetic
  source 1..19: mol_type = other RNA
gtgagggttgaactcaata

SEQ ID NO: 155 - RNA, 19 nt, synthetic construct
  misc_feature 1..19: note = Synthetic
  source 1..19: mol_type = other RNA
tgccgtgcatgaacaagca

SEQ ID NO: 156 - RNA, 19 nt, synthetic construct
  misc_feature 1..19: note = Synthetic
  source 1..19: mol_type = other RNA
gcaagagattggattaaca

SEQ ID NO: 157 - RNA, 19 nt, synthetic construct
  misc_feature 1..19: note = Synthetic
  source 1..19: mol_type = other RNA
cccacctagtgctcctaat

SEQ ID NO: 158 - RNA, 19 nt, synthetic construct
  misc_feature 1..19: note = Synthetic
  source 1..19: mol_type = other RNA
catcgtgccgtgcatgaac

SEQ ID NO: 159 - RNA, 19 nt, synthetic construct
  misc_feature 1..19: note = Synthetic
  source 1..19: mol_type = other RNA
tacatcgtgccgtgcatga

SEQ ID NO: 160 - RNA, 19 nt, synthetic construct
  misc_feature 1..19: note = Synthetic
  source 1..19: mol_type = other RNA
ccgtgcatgaacaagcacg

SEQ ID NO: 161 - RNA, 19 nt, synthetic construct
  misc_feature 1..19: note = Synthetic
  source 1..19: mol_type = other RNA
cgacaatgctactggagtt

SEQ ID NO: 162 - RNA, 19 nt, synthetic construct
  misc_feature 1..19: note = Synthetic
  source 1..19: mol_type = other RNA
gcgcagcacagattctatt

SEQ ID NO: 163 - RNA, 19 nt, synthetic construct
  misc_feature 1..19: note = Synthetic
  source 1..19: mol_type = other RNA
gcaagcaccacatgtgttt

SEQ ID NO: 164 - RNA, 19 nt, synthetic construct
  misc_feature 1..19: note = Synthetic
  source 1..19: mol_type = other RNA
cgcagcacagattctatta

SEQ ID NO: 165 - RNA, 19 nt, synthetic construct
  misc_feature 1..19: note = Synthetic
  source 1..19: mol_type = other RNA
gcctgcggcccaacgggca

SEQ ID NO: 166 - RNA, 19 nt, synthetic construct
  misc_feature 1..19: note = Synthetic
  source 1..19: mol_type = other RNA
ggacattcattgcctcact

SEQ ID NO: 167 - RNA, 19 nt, synthetic construct
  misc_feature 1..19: note = Synthetic
  source 1..19: mol_type = other RNA
gttcggtttgaaatttgaa

SEQ ID NO: 168 - RNA, 19 nt, synthetic construct
  misc_feature 1..19: note = Synthetic
  source 1..19: mol_type = other RNA
accgtcgcaaccctcatga

SEQ ID NO: 169 - RNA, 19 nt, synthetic construct
  misc_feature 1..19: note = Synthetic
  source 1..19: mol_type = other RNA
caataactgtttggtattt

SEQ ID NO: 170 - RNA, 21 nt, synthetic construct
  misc_feature 1..21: note = Synthetic
  misc_feature 1: note = Nucleotide linked to an inverted abasic cap
  modified_base 3: mod_base = OTHER; note = 2'-O-methyl modified nucleotide
  modified_base 5: mod_base = OTHER; note = 2'-O-methyl modified nucleotide
  modified_base 7: mod_base = OTHER; note = 2'-O-methyl modified nucleotide
  modified_base 10: mod_base = OTHER; note = 2'-O-methyl modified nucleotide
  modified_base 12: mod_base = OTHER; note = 2'-O-methyl modified nucleotide
  modified_base 14: mod_base = OTHER; note = 2'-O-methyl modified nucleotide
  modified_base 16: mod_base = OTHER; note = 2'-O-methyl modified nucleotide
  modified_base 18: mod_base = OTHER; note = 2'-O-methyl modified nucleotide
  modified_base 20..21: mod_base = OTHER; note = 2'-O-methyl modified nucleotide
  modified_base 20..21: mod_base = OTHER; note = phosphorothioate linkage
  misc_feature 21: note = Nucleotide linked to an inverted abasic cap
  source 1..21: mol_type = other RNA
gatgtgtgacatgtatatatt

SEQ ID NO: 171 - RNA, 21 nt, synthetic construct
  misc_feature 1..21: note = Synthetic
  modified_base 4: mod_base = OTHER; note = 2'-O-methyl modified nucleotide
  modified_base 5: mod_base = OTHER; note = 2'-deoxy-2'-fluoro modified nucleotide
  modified_base 6: mod_base = OTHER; note = 2'-O-methyl modified nucleotide
  modified_base 7: mod_base = OTHER; note = 2'-deoxy-2'-fluoro modified nucleotide
  modified_base 8: mod_base = OTHER; note = 2'-O-methyl modified nucleotide
  modified_base 9: mod_base = OTHER; note = 2'-deoxy-2'-fluoro modified nucleotide
  modified_base 10: mod_base = OTHER; note = 2'-O-methyl modified nucleotide
  modified_base 11..12: mod_base = OTHER; note = 2'-deoxy-2'-fluoro modified nucleotide
  modified_base 13: mod_base = OTHER; note = 2'-O-methyl modified nucleotide
  modified_base 14: mod_base = OTHER; note = 2'-deoxy-2'-fluoro modified nucleotide
  modified_base 15: mod_base = OTHER; note = 2'-O-methyl modified nucleotide
  modified_base 16: mod_base = OTHER; note = 2'-deoxy-2'-fluoro modified nucleotide
  modified_base 17: mod_base = OTHER; note = 2'-O-methyl modified nucleotide
  modified_base 18..19: mod_base = OTHER; note = 2'-deoxy-2'-fluoro modified nucleotide
  modified_base 20..21: mod_base = OTHER; note = 2'-O-methyl modified nucleotide
  modified_base 20..21: mod_base = OTHER; note = phosphorothioate linkage
  source 1..21: mol_type = other RNA
tatatacatgtcacacatctt

SEQ ID NO: 172 - DNA, 21 bp, synthetic construct
  misc_feature 1..21: note = Synthetic
  misc_feature 1..19: note = ribonucleotide unmodified or modified as described for this sequence
  misc_feature 1: note = Nucleotide linked to an inverted abasic cap
  modified_base 2..3: mod_base = OTHER; note = 2'-deoxy-2'-fluoro modified nucleotide
  modified_base 5: mod_base = OTHER; note = 2'-deoxy-2'-fluoro modified nucleotide
  modified_base 7: mod_base = OTHER; note = 2'-deoxy-2'-fluoro modified nucleotide
  modified_base 9: mod_base = OTHER; note = 2'-deoxy-2'-fluoro modified nucleotide
  modified_base 11..12: mod_base = OTHER; note = 2'-deoxy-2'-fluoro modified nucleotide
  modified_base 14: mod_base = OTHER; note = 2'-deoxy-2'-fluoro modified nucleotide
  modified_base 16..17: mod_base = OTHER; note = 2'-deoxy-2'-fluoro modified nucleotide
  misc_feature 21: note = Nucleotide linked to an inverted abasic cap
  source 1..21: mol_type = other DNA
  misc_feature 1: note = DNA
  misc_feature 2..3: note = RNA
  misc_feature 4: note = DNA
  misc_feature 5: note = RNA
  misc_feature 6: note = DNA
  misc_feature 7: note = RNA
  misc_feature 8: note = DNA
  misc_feature 9: note = RNA
  misc_feature 10: note = DNA
  misc_feature 11..12: note = RNA
  misc_feature 13: note = DNA
  misc_feature 14: note = RNA
  misc_feature 15: note = DNA
  misc_feature 16..17: note = RNA
  misc_feature 18..21: note = DNA
gttatgtacgtcatgttgatt

SEQ ID NO: 173 - RNA, 21 nt, synthetic construct
  misc_feature 1..21: note = Synthetic
  modified_base 4: mod_base = OTHER; note = 2'-O-methyl modified nucleotide
  modified_base 5: mod_base = OTHER; note = 2'-deoxy-2'-fluoro modified nucleotide
  modified_base 6: mod_base = OTHER; note = 2'-O-methyl modified nucleotide
  modified_base 7: mod_base = OTHER; note = 2'-deoxy-2'-fluoro modified nucleotide
  modified_base 8..9: mod_base = OTHER; note = 2'-O-methyl modified nucleotide
  modified_base 10: mod_base = OTHER; note = 2'-deoxy-2'-fluoro modified nucleotide
  modified_base 11: mod_base = OTHER; note = 2'-O-methyl modified nucleotide
  modified_base 12: mod_base = OTHER; note = 2'-deoxy-2'-fluoro modified nucleotide
  modified_base 13: mod_base = OTHER; note = 2'-O-methyl modified nucleotide
  modified_base 14: mod_base = OTHER; note = 2'-deoxy-2'-fluoro modified nucleotide
  modified_base 15: mod_base = OTHER; note = 2'-O-methyl modified nucleotide
  modified_base 16: mod_base = OTHER; note = 2'-deoxy-2'-fluoro modified nucleotide
  modified_base 17..18: mod_base = OTHER; note = 2'-O-methyl modified nucleotide
  modified_base 19: mod_base = OTHER; note = 2'-deoxy-2'-fluoro modified nucleotide
  modified_base 20..21: mod_base = OTHER; note = 2'-O-methyl modified nucleotide
  source 1..21: mol_type = other RNA
tcaacatgacgtacataactt

SEQ ID NO: 174 - RNA, 21 nt, synthetic construct
  misc_feature 1..21: note = Synthetic
  misc_feature 1: note = Nucleotide linked to an inverted abasic cap
  modified_base 1..2: mod_base = OTHER; note = 2'-O-methyl modified nucleotide
  modified_base 4: mod_base = OTHER; note = 2'-O-methyl modified nucleotide
  modified_base 6: mod_base = OTHER; note = 2'-O-methyl modified nucleotide
  modified_base 8..9: mod_base = OTHER; note = 2'-O-methyl modified nucleotide
  modified_base 11: mod_base = OTHER; note = 2'-O-methyl modified nucleotide
  modified_base 13: mod_base = OTHER; note = 2'-O-methyl modified nucleotide
  modified_base 15: mod_base = OTHER; note = 2'-O-methyl modified nucleotide
  modified_base 17: mod_base = OTHER; note = 2'-O-methyl modified nucleotide
  modified_base 19..21: mod_base = OTHER; note = 2'-O-methyl modified nucleotide
  modified_base 20..21: mod_base = OTHER; note = phosphorothioate linkage
  misc_feature 21: note = Nucleotide linked to an inverted abasic cap
  source 1..21: mol_type = other RNA
gatgtgtgacatgtatatatt

SEQ ID NO: 175 - DNA, 21 bp, synthetic construct
  misc_feature 1..21: note = Synthetic
  misc_feature 1: note = Nucleotide linked to an inverted abasic cap
  modified_base 3: mod_base = OTHER; note = 2'-deoxy-2'-fluoro modified nucleotide
  modified_base 5: mod_base = OTHER; note = 2'-deoxy-2'-fluoro modified nucleotide
  modified_base 7: mod_base = OTHER; note = 2'-deoxy-2'-fluoro modified nucleotide
  modified_base 10: mod_base = OTHER; note = 2'-deoxy-2'-fluoro modified nucleotide
  modified_base 12: mod_base = OTHER; note = 2'-deoxy-2'-fluoro modified nucleotide
  modified_base 14: mod_base = OTHER; note = 2'-deoxy-2'-fluoro modified nucleotide
  modified_base 16: mod_base = OTHER; note = 2'-deoxy-2'-fluoro modified nucleotide
  modified_base 18: mod_base = OTHER; note = 2'-deoxy-2'-fluoro modified nucleotide
  modified_base 20..21: mod_base = OTHER; note = 2'-O-methyl modified nucleotide
  modified_base 20..21: mod_base = OTHER; note = phosphorothioate linkage
  misc_feature 21: note = Nucleotide linked to an inverted abasic cap
  source 1..21: mol_type = other DNA
  misc_feature 1..2: note = DNA
  misc_feature 3: note = RNA
  misc_feature 4: note = DNA
  misc_feature 5: note = RNA
  misc_feature 6: note = DNA
  misc_feature 7: note = RNA
  misc_feature 8..9: note = DNA
  misc_feature 10: note = RNA
  misc_feature 11: note = DNA
  misc_feature 12: note = RNA
  misc_feature 13: note = DNA
  misc_feature 14: note = RNA
  misc_feature 15: note = DNA
  misc_feature 16: note = RNA
  misc_feature 17: note = DNA
  misc_feature 18: note = RNA
  misc_feature 19: note = DNA
  misc_feature 20..21: note = RNA
gatgtgtgacatgtatatatt

SEQ ID NO: 176 - DNA, 21 bp, synthetic construct
  misc_feature 1..21: note = Synthetic
  misc_feature 1..19: note = ribonucleotide unmodified or modified as described for this sequence
  misc_feature 1: note = Nucleotide linked to an inverted abasic cap
  modified_base 3: mod_base = OTHER; note = 2'-deoxy-2'-fluoro modified nucleotide
  modified_base 5: mod_base = OTHER; note = 2'-deoxy-2'-fluoro modified nucleotide
  modified_base 7: mod_base = OTHER; note = 2'-deoxy-2'-fluoro modified nucleotide
  modified_base 10: mod_base = OTHER; note = 2'-deoxy-2'-fluoro modified nucleotide
  modified_base 12: mod_base = OTHER; note = 2'-deoxy-2'-fluoro modified nucleotide
  modified_base 14: mod_base = OTHER; note = 2'-deoxy-2'-fluoro modified nucleotide
  modified_base 16: mod_base = OTHER; note = 2'-deoxy-2'-fluoro modified nucleotide
  modified_base 18: mod_base = OTHER; note = 2'-deoxy-2'-fluoro modified nucleotide
  modified_base 20..21: mod_base = OTHER; note = phosphorothioate linkage
  misc_feature 21: note = Nucleotide linked to an inverted abasic cap
  source 1..21: mol_type = other DNA
  misc_feature 1..2: note = DNA
  misc_feature 3: note = RNA
  misc_feature 4: note = DNA
  misc_feature 5: note = RNA
  misc_feature 6: note = DNA
  misc_feature 7: note = RNA
  misc_feature 8..9: note = DNA
  misc_feature 10: note = RNA
  misc_feature 11: note = DNA
  misc_feature 12: note = RNA
  misc_feature 13: note = DNA
  misc_feature 14: note = RNA
  misc_feature 15: note = DNA
  misc_feature 16: note = RNA
  misc_feature 17: note = DNA
  misc_feature 18: note = RNA
  misc_feature 19..21: note = DNA
gatgtgtgacatgtatatatt

SEQ ID NO: 177 - DNA, 21 bp, synthetic construct
  misc_feature 1..21: note = Synthetic
  misc_feature 1..19: note = ribonucleotide unmodified or modified as described for this sequence
  misc_feature 1: note = Nucleotide linked to an inverted abasic cap
  modified_base 2..3: mod_base = OTHER; note = 2'-deoxy-2'-fluoro modified nucleotide
  modified_base 5: mod_base = OTHER; note = 2'-deoxy-2'-fluoro modified nucleotide
  modified_base 7..8: mod_base = OTHER; note = 2'-deoxy-2'-fluoro modified nucleotide
  modified_base 11: mod_base = OTHER; note = 2'-deoxy-2'-fluoro modified nucleotide
  modified_base 14..16: mod_base = OTHER; note = 2'-deoxy-2'-fluoro modified nucleotide
  misc_feature 21: note = Nucleotide linked to an inverted abasic cap
  source 1..21: mol_type = other DNA
  misc_feature 1: note = DNA
  misc_feature 2..3: note = RNA
  misc_feature 4: note = DNA
  misc_feature 5: note = RNA
  misc_feature 6: note = DNA
  misc_feature 7..8: note = RNA
  misc_feature 9..10: note = DNA
  misc_feature 11: note = RNA
  misc_feature 12..13: note = DNA
  misc_feature 14..16: note = RNA
  misc_feature 17..21: note = DNA
gtcatgttgataatccaaatt

SEQ ID NO: 178 - RNA, 21 nt, synthetic construct
  misc_feature 1..21: note = Synthetic
  modified_base 4..6: mod_base = OTHER; note = 2'-O-methyl modified nucleotide
  modified_base 7..8: mod_base = OTHER; note = 2'-deoxy-2'-fluoro modified nucleotide
  modified_base 9: mod_base = OTHER; note = 2'-O-methyl modified nucleotide
  modified_base 10..11: mod_base = OTHER; note = 2'-deoxy-2'-fluoro modified nucleotide
  modified_base 12..13: mod_base = OTHER; note = 2'-O-methyl modified nucleotide
  modified_base 14: mod_base = OTHER; note = 2'-deoxy-2'-fluoro modified nucleotide
  modified_base 15: mod_base = OTHER; note = 2'-O-methyl modified nucleotide
  modified_base 16: mod_base = OTHER; note = 2'-deoxy-2'-fluoro modified nucleotide
  modified_base 17..18: mod_base = OTHER; note = 2'-O-methyl modified nucleotide
  modified_base 19: mod_base = OTHER; note = 2'-deoxy-2'-fluoro modified nucleotide
  modified_base 20..21: mod_base = OTHER; note = 2'-O-methyl modified nucleotide
  source 1..21: mol_type = other RNA
tttggattatcaacatgactt

SEQ ID NO: 179 - RNA, 21 nt, synthetic construct
  misc_feature 1..21: note = Synthetic
  modified_base 1: mod_base = OTHER; note = 2'-deoxy-2'-fluoro modified nucleotide
  modified_base 4: mod_base = OTHER; note = 2'-deoxy-2'-fluoro modified nucleotide
  modified_base 6: mod_base = OTHER; note = 2'-deoxy-2'-fluoro modified nucleotide
  modified_base 8: mod_base = OTHER; note = 2'-deoxy-2'-fluoro modified nucleotide
  modified_base 10: mod_base = OTHER; note = 2'-deoxy-2'-fluoro modified nucleotide
  modified_base 12: mod_base = OTHER; note = 2'-deoxy-2'-fluoro modified nucleotide
  modified_base 14..15: mod_base = OTHER; note = 2'-deoxy-2'-fluoro modified nucleotide
  modified_base 17: mod_base = OTHER; note = 2'-deoxy-2'-fluoro modified nucleotide
  modified_base 19: mod_base = OTHER; note = 2'-deoxy-2'-fluoro modified nucleotide
  modified_base 20..21: mod_base = OTHER; note = 2'-O-methyl modified nucleotide
  modified_base 20..21: mod_base = OTHER; note = phosphorothioate linkage
  source 1..21: mol_type = other RNA
taatatatacatgtcacactt

SEQ ID NO: 180 - RNA, 21 nt, synthetic construct
  misc_feature 1..21: note = Synthetic
  misc_feature 1: note = Nucleotide linked to an inverted abasic cap
  modified_base 1: mod_base = OTHER; note = 2'-O-methyl modified nucleotide
  modified_base 2: mod_base = OTHER; note = 2'-deoxy-2'-fluoro modified nucleotide
  modified_base 3: mod_base = OTHER; note = 2'-O-methyl modified nucleotide
  modified_base 4: mod_base = OTHER; note = 2'-deoxy-2'-fluoro modified nucleotide
  modified_base 5..6: mod_base = OTHER; note = 2'-O-methyl modified nucleotide
  modified_base 7: mod_base = OTHER; note = 2'-deoxy-2'-fluoro modified nucleotide
  modified_base 8: mod_base = OTHER; note = 2'-O-methyl modified nucleotide
  modified_base 9: mod_base = OTHER; note = 2'-deoxy-2'-fluoro modified nucleotide
  modified_base 10: mod_base = OTHER; note = 2'-O-methyl modified nucleotide
  modified_base 11: mod_base = OTHER; note = 2'-deoxy-2'-fluoro modified nucleotide
  modified_base 12: mod_base = OTHER; note = 2'-O-methyl modified nucleotide
  modified_base 13: mod_base = OTHER; note = 2'-deoxy-2'-fluoro modified nucleotide
  modified_base 14: mod_base = OTHER; note = 2'-O-methyl modified nucleotide
  modified_base 15: mod_base = OTHER; note = 2'-deoxy-2'-fluoro modified nucleotide
  modified_base 16: mod_base = OTHER; note = 2'-O-methyl modified nucleotide
  modified_base 17..18: mod_base = OTHER; note = 2'-deoxy-2'-fluoro modified nucleotide
  modified_base 19..21: mod_base = OTHER; note = 2'-O-methyl modified nucleotide
  modified_base 20..21: mod_base = OTHER; note = phosphorothioate linkage
  misc_feature 21: note = Nucleotide linked to an inverted abasic cap
  source 1..21: mol_type = other RNA
gtgtgacatgtatatattatt

SEQ ID NO: 181 - DNA, 21 bp, synthetic construct
  misc_feature 1..21: note = Synthetic
  misc_feature 1..19: note = ribonucleotide unmodified or modified as described for this sequence
  misc_feature 1: note = Nucleotide linked to an inverted abasic cap
  modified_base 1: mod_base = OTHER; note = 2'-deoxy-2'-fluoro modified nucleotide
  modified_base 3..4: mod_base = OTHER; note = 2'-deoxy-2'-fluoro modified nucleotide
  modified_base 7: mod_base = OTHER; note = 2'-deoxy-2'-fluoro modified nucleotide
  modified_base 10..12: mod_base = OTHER; note = 2'-deoxy-2'-fluoro modified nucleotide
  modified_base 16: mod_base = OTHER; note = 2'-deoxy-2'-fluoro modified nucleotide
  misc_feature 21: note = Nucleotide linked to an inverted abasic cap
  source 1..21: mol_type = other DNA
  misc_feature 1: note = RNA
  misc_feature 2: note = DNA
  misc_feature 3..4: note = RNA
  misc_feature 5..6: note = DNA
  misc_feature 7: note = RNA
  misc_feature 8..9: note = DNA
  misc_feature 10..12: note = RNA
  misc_feature 13..15: note = DNA
  misc_feature 16: note = RNA
  misc_feature 17..21: note = DNA
tgttgataatccaaatggatt

SEQ ID NO: 182 - RNA, 21 nt, synthetic construct
  misc_feature 1..21: note = Synthetic
  modified_base 4: mod_base = OTHER; note = 2'-O-methyl modified nucleotide
  modified_base 5..7: mod_base = OTHER; note = 2'-deoxy-2'-fluoro modified nucleotide
  modified_base 8..10: mod_base = OTHER; note = 2'-O-methyl modified nucleotide
  modified_base 11..12: mod_base = OTHER; note = 2'-deoxy-2'-fluoro modified nucleotide
  modified_base 13: mod_base = OTHER; note = 2'-O-methyl modified nucleotide
  modified_base 14..15: mod_base = OTHER; note = 2'-deoxy-2'-fluoro modified nucleotide
  modified_base 16..17: mod_base = OTHER; note = 2'-O-methyl modified nucleotide
  modified_base 18: mod_base = OTHER; note = 2'-deoxy-2'-fluoro modified nucleotide
  modified_base 19..21: mod_base = OTHER; note = 2'-O-methyl modified nucleotide
  source 1..21: mol_type = other RNA
tccatttggattatcaacatt

SEQ ID NO: 183 - DNA, 21 bp, synthetic construct
  misc_feature 1..21: note = Synthetic
  misc_feature 1..19: note = ribonucleotide unmodified or modified as described for this sequence
  misc_feature 1: note = Nucleotide linked to an inverted abasic cap
  modified_base 3: mod_base = OTHER; note = 2'-deoxy-2'-fluoro modified nucleotide
  modified_base 5: mod_base = OTHER; note = 2'-deoxy-2'-fluoro modified nucleotide
  modified_base 7: mod_base = OTHER; note = 2'-deoxy-2'-fluoro modified nucleotide
  modified_base 10: mod_base = OTHER; note = 2'-deoxy-2'-fluoro modified nucleotide
  modified_base 12: mod_base = OTHER; note = 2'-deoxy-2'-fluoro modified nucleotide
  modified_base 14: mod_base = OTHER; note = 2'-deoxy-2'-fluoro modified nucleotide
  modified_base 16: mod_base = OTHER; note = 2'-deoxy-2'-fluoro modified nucleotide
  modified_base 18: mod_base = OTHER; note = 2'-deoxy-2'-fluoro modified nucleotide
  misc_feature 21: note = Nucleotide linked to an inverted abasic cap
  source 1..21: mol_type = other DNA
  misc_feature 1..2: note = DNA
  misc_feature 3: note = RNA
  misc_feature 4: note = DNA
  misc_feature 5: note = RNA
  misc_feature 6: note = DNA
  misc_feature 7: note = RNA
  misc_feature 8..9: note = DNA
  misc_feature 10: note = RNA
  misc_feature 11: note = DNA
  misc_feature 12: note = RNA
  misc_feature 13: note = DNA
  misc_feature 14: note = RNA
  misc_feature 15: note = DNA
  misc_feature 16: note = RNA
  misc_feature 17: note = DNA
  misc_feature 18: note = RNA
  misc_feature 19..21: note = DNA
gatgtgtgacatgtatatatt

SEQ ID NO: 184 - RNA, 21 nt, synthetic construct
  misc_feature 1..21: note = Synthetic
  modified_base 4: mod_base = OTHER; note = 2'-O-methyl modified nucleotide
  modified_base 5: mod_base = OTHER; note = 2'-deoxy-2'-fluoro modified nucleotide
  modified_base 6: mod_base = OTHER; note = 2'-O-methyl modified nucleotide
  modified_base 7: mod_base = OTHER; note = 2'-deoxy-2'-fluoro modified nucleotide
  modified_base 8: mod_base = OTHER; note = 2'-O-methyl modified nucleotide
  modified_base 9: mod_base = OTHER; note = 2'-deoxy-2'-fluoro modified nucleotide
  modified_base 10: mod_base = OTHER; note = 2'-O-methyl modified nucleotide
  modified_base 11..12: mod_base = OTHER; note = 2'-deoxy-2'-fluoro modified nucleotide
  modified_base 13: mod_base = OTHER; note = 2'-O-methyl modified nucleotide
  modified_base 14: mod_base = OTHER; note = 2'-deoxy-2'-fluoro modified nucleotide
  modified_base 15: mod_base = OTHER; note = 2'-O-methyl modified nucleotide
  modified_base 16: mod_base = OTHER; note = 2'-deoxy-2'-fluoro modified nucleotide
  modified_base 17: mod_base = OTHER; note = 2'-O-methyl modified nucleotide
  modified_base 18..19: mod_base = OTHER; note = 2'-deoxy-2'-fluoro modified nucleotide
  modified_base 20..21: mod_base = OTHER; note = 2'-O-methyl modified nucleotide
  source 1..21: mol_type = other RNA
tatatacatgtcacacatctt

SEQ ID NO: 185 - DNA, 21 bp, synthetic construct
  misc_feature 1..21: note = Synthetic
  misc_feature 1..19: note = ribonucleotide unmodified or modified as described for this sequence
  misc_feature 1: note = Nucleotide linked to an inverted abasic cap
  modified_base 3: mod_base = OTHER; note = 2'-deoxy-2'-fluoro modified nucleotide
  modified_base 7..8: mod_base = OTHER; note = 2'-deoxy-2'-fluoro modified nucleotide
  modified_base 10: mod_base = OTHER; note = 2'-deoxy-2'-fluoro modified nucleotide
  modified_base 12: mod_base = OTHER; note = 2'-deoxy-2'-fluoro modified nucleotide
  modified_base 14: mod_base = OTHER; note = 2'-deoxy-2'-fluoro modified nucleotide
  modified_base 16..17: mod_base = OTHER; note = 2'-deoxy-2'-fluoro modified nucleotide
  modified_base 19: mod_base = OTHER; note = 2'-deoxy-2'-fluoro modified nucleotide
  misc_feature 21: note = Nucleotide linked to an inverted abasic cap
  source 1..21: mol_type = other DNA
  misc_feature 1..2: note = DNA
  misc_feature 3: note = RNA
  misc_feature 4..6: note = DNA
  misc_feature 7..8: note = RNA
  misc_feature 9: note = DNA
  misc_feature 10: note = RNA
  misc_feature 11: note = DNA
  misc_feature 12: note = RNA
  misc_feature 13: note = DNA
  misc_feature 14: note = RNA
  misc_feature 15: note = DNA
  misc_feature 16..17: note = RNA
  misc_feature 18: note = DNA
  misc_feature 19: note = RNA
  misc_feature 20..21: note = DNA
aacgggttatgtacgtcattt

SEQ ID NO: 186 - RNA, 21 nt, synthetic construct
  misc_feature 1..21: note = Synthetic
  modified_base 4: mod_base = OTHER; note = 2'-O-methyl modified nucleotide
  modified_base 5: mod_base = OTHER; note = 2'-deoxy-2'-fluoro modified nucleotide
  modified_base 6: mod_base = OTHER; note = 2'-O-methyl modified nucleotide
  modified_base 7: mod_base = OTHER; note = 2'-deoxy-2'-fluoro modified nucleotide
  modified_base 8: mod_base = OTHER; note = 2'-O-methyl modified nucleotide
  modified_base 9: mod_base = OTHER; note = 2'-deoxy-2'-fluoro modified nucleotide
  modified_base 10: mod_base = OTHER; note = 2'-O-methyl modified nucleotide
  modified_base 11: mod_base = OTHER; note = 2'-deoxy-2'-fluoro modified nucleotide
  modified_base 12..13: mod_base = OTHER; note = 2'-O-methyl modified nucleotide
  modified_base 14..16: mod_base = OTHER; note = 2'-deoxy-2'-fluoro modified nucleotide
  modified_base 17: mod_base = OTHER; note = 2'-O-methyl modified nucleotide
  modified_base 18..19: mod_base = OTHER; note = 2'-deoxy-2'-fluoro modified nucleotide
  modified_base 20..21: mod_base = OTHER; note = 2'-O-methyl modified nucleotide
  source 1..21: mol_type = other RNA
atgacgtacataacccgtttt

SEQ ID NO: 187 - RNA, 21 nt, synthetic construct
  misc_feature 1..21: note = Synthetic
  misc_feature 1: note = Nucleotide linked to an inverted abasic cap
  modified_base 2: mod_base = OTHER; note = 2'-deoxy-2'-fluoro modified nucleotide
  modified_base 4: mod_base = OTHER; note = 2'-deoxy-2'-fluoro modified nucleotide
  modified_base 7: mod_base = OTHER; note = 2'-deoxy-2'-fluoro modified nucleotide
  modified_base 9: mod_base = OTHER; note = 2'-deoxy-2'-fluoro modified nucleotide
  modified_base 11: mod_base = OTHER; note = 2'-deoxy-2'-fluoro modified nucleotide
  modified_base 13: mod_base = OTHER; note = 2'-deoxy-2'-fluoro modified nucleotide
  modified_base 15: mod_base = OTHER; note = 2'-deoxy-2'-fluoro modified nucleotide
  modified_base 17..18: mod_base = OTHER; note = 2'-deoxy-2'-fluoro modified nucleotide
  modified_base 20..21: mod_base = OTHER; note = 2'-O-methyl modified nucleotide
  modified_base 20..21: mod_base = OTHER; note = phosphorothioate linkage
  misc_feature 21: note = Nucleotide linked to an inverted abasic cap
  source 1..21: mol_type = other RNA
gtgtgacatgtatatattatt

SEQ ID NO: 188 - RNA, 21 nt, synthetic construct
  misc_feature 1..21: note = Synthetic
  misc_feature 1: note = Nucleotide linked to an inverted abasic cap
  modified_base 3: mod_base = OTHER; note = 2'-O-methyl modified nucleotide
  modified_base 10: mod_base = OTHER; note = 2'-O-methyl modified nucleotide
  modified_base 12: mod_base = OTHER; note = 2'-O-methyl modified nucleotide
  modified_base 14: mod_base = OTHER; note = 2'-O-methyl modified nucleotide
  modified_base 17: mod_base = OTHER; note = 2'-O-methyl modified nucleotide
  modified_base 19..21: mod_base = OTHER; note = 2'-O-methyl modified nucleotide
  modified_base 20..21: mod_base = OTHER; note = phosphorothioate linkage
  misc_feature 21: note = Nucleotide linked to an inverted abasic cap
  source 1..21: mol_type = other RNA
gatggaagatgtgtgacattt

SEQ ID NO: 189 - RNA, 21 nt, synthetic construct
  misc_feature 1..21: note = Synthetic
  modified_base 6: mod_base = OTHER; note = 2'-deoxy-2'-fluoro modified nucleotide
  modified_base 8: mod_base = OTHER; note = 2'-deoxy-2'-fluoro modified nucleotide
  modified_base 10: mod_base = OTHER; note = 2'-deoxy-2'-fluoro modified nucleotide
  modified_base 17: mod_base = OTHER; note = 2'-deoxy-2'-fluoro modified nucleotide
  modified_base 20..21: mod_base = OTHER; note = 2'-O-methyl modified nucleotide
  modified_base 20..21: mod_base = OTHER; note = phosphorothioate linkage
  source 1..21: mol_type = other RNA
atgtcacacatcttccatctt

SEQ ID NO: 190 - RNA, 21 nt, synthetic construct
  misc_feature 1..21: note = Synthetic
  misc_feature 1: note = Nucleotide linked to an inverted abasic cap
  modified_base 1: mod_base = OTHER; note = 2'-deoxy-2'-fluoro modified nucleotide
  modified_base 3: mod_base = OTHER; note = 2'-deoxy-2'-fluoro modified nucleotide
  modified_base 5: mod_base = OTHER; note = 2'-deoxy-2'-fluoro modified nucleotide
  modified_base 8: mod_base = OTHER; note = 2'-deoxy-2'-fluoro modified nucleotide
  modified_base 10: mod_base = OTHER; note = 2'-deoxy-2'-fluoro modified nucleotide
  modified_base 12: mod_base = OTHER; note = 2'-deoxy-2'-fluoro modified nucleotide
  modified_base 14: mod_base = OTHER; note = 2'-deoxy-2'-fluoro modified nucleotide
  modified_base 16: mod_base = OTHER; note = 2'-deoxy-2'-fluoro modified nucleotide
  modified_base 18..19: mod_base = OTHER; note = 2'-deoxy-2'-fluoro modified nucleotide
  modified_base 20..21: mod_base = OTHER; note = 2'-O-methyl modified nucleotide
  modified_base 20..21: mod_base = OTHER; note = phosphorothioate linkage
  misc_feature 21: note = Nucleotide linked to an inverted abasic cap
  source 1..21: mol_type = other RNA
tgtgtgacatgtatatatttt

SEQ ID NO: 191 - RNA, 21 nt, synthetic construct
  misc_feature 1..21: note = Synthetic
  modified_base 3: mod_base = OTHER; note = 2'-deoxy-2'-fluoro modified nucleotide
  modified_base 5: mod_base = OTHER; note = 2'-deoxy-2'-fluoro modified nucleotide
  modified_base 7: mod_base = OTHER; note = 2'-deoxy-2'-fluoro modified nucleotide
  modified_base 9: mod_base = OTHER; note = 2'-deoxy-2'-fluoro modified nucleotide
  modified_base 11: mod_base = OTHER; note = 2'-deoxy-2'-fluoro modified nucleotide
  modified_base 13..14: mod_base = OTHER; note = 2'-deoxy-2'-fluoro modified nucleotide
  modified_base 16: mod_base = OTHER; note = 2'-deoxy-2'-fluoro modified nucleotide
  modified_base 18: mod_base = OTHER; note = 2'-deoxy-2'-fluoro modified nucleotide
  modified_base 20..21: mod_base = OTHER; note = 2'-O-methyl modified nucleotide
  modified_base 20..21: mod_base = OTHER; note = phosphorothioate linkage
  source 1..21: mol_type = other RNA
aatatatacatgtcacacatt

SEQ ID NO: 192 - RNA, 21 nt, synthetic construct
  misc_feature 1..21: note = Synthetic
  misc_feature 1: note = Nucleotide linked to an inverted abasic cap
  modified_base 1..2: mod_base = OTHER; note = 2'-O-methyl modified nucleotide
  modified_base 4..9: mod_base = OTHER; note = 2'-O-methyl modified nucleotide
  modified_base 11: mod_base = OTHER; note = 2'-O-methyl modified nucleotide
  modified_base 13: mod_base = OTHER; note = 2'-O-methyl modified nucleotide
  modified_base 15..16: mod_base = OTHER; note = 2'-O-methyl modified nucleotide
  modified_base 18: mod_base = OTHER; note = 2'-O-methyl modified nucleotide
  modified_base 20..21: mod_base = OTHER; note = 2'-O-methyl modified nucleotide
  modified_base 20..21: mod_base = OTHER; note = phosphorothioate linkage
  misc_feature 21: note = Nucleotide linked to an inverted abasic cap
  source 1..21: mol_type = other RNA
gatggaagatgtgtgacattt

SEQ ID NO: 193 - DNA, 21 bp, synthetic construct
  misc_feature 1..21: note = Synthetic
  misc_feature 1..19: note = ribonucleotide unmodified or modified as described for this sequence
  misc_feature 1: note = Nucleotide linked to an inverted abasic cap
  modified_base 7: mod_base = OTHER; note = 2'-deoxy-2'-fluoro modified nucleotide
  modified_base 9: mod_base = OTHER; note = 2'-deoxy-2'-fluoro modified nucleotide
  modified_base 11: mod_base = OTHER; note = 2'-deoxy-2'-fluoro modified nucleotide
  modified_base 14: mod_base = OTHER; note = 2'-deoxy-2'-fluoro modified nucleotide
  modified_base 16: mod_base = OTHER; note = 2'-deoxy-2'-fluoro modified nucleotide
  modified_base 18: mod_base = OTHER; note = 2'-deoxy-2'-fluoro modified nucleotide
  misc_feature 21: note = Nucleotide linked to an inverted abasic cap
  source 1..21: mol_type = other DNA
  misc_feature 1..6: note = DNA
  misc_feature 7: note = RNA
  misc_feature 8: note = DNA
  misc_feature 9: note = RNA
  misc_feature 10: note = DNA
  misc_feature 11: note = RNA
  misc_feature 12..13: note = DNA
  misc_feature 14: note = RNA
  misc_feature 15: note = DNA
  misc_feature 16: note = RNA
  misc_feature 17: note = DNA
  misc_feature 18: note = RNA
  misc_feature 19..21: note = DNA
ggaagatgtgtgacatgtatt

SEQ ID NO: 194 - RNA, 21 nt, synthetic construct
  misc_feature 1..21: note = Synthetic
  modified_base 4: mod_base = OTHER; note = 2'-O-methyl modified nucleotide
  modified_base 5: mod_base = OTHER; note = 2'-deoxy-2'-fluoro modified nucleotide
  modified_base 6: mod_base = OTHER; note = 2'-O-methyl modified nucleotide
  modified_base 7..8: mod_base = OTHER; note = 2'-deoxy-2'-fluoro modified nucleotide
  modified_base 9: mod_base = OTHER; note = 2'-O-methyl modified nucleotide
  modified_base 10: mod_base = OTHER; note = 2'-deoxy-2'-fluoro modified nucleotide
  modified_base 11: mod_base = OTHER; note = 2'-O-methyl modified nucleotide
  modified_base 12: mod_base = OTHER; note = 2'-deoxy-2'-fluoro modified nucleotide
  modified_base 13: mod_base = OTHER; note = 2'-O-methyl modified nucleotide
  modified_base 14..19: mod_base = OTHER; note = 2'-deoxy-2'-fluoro modified nucleotide
  modified_base 20..21: mod_base = OTHER; note = 2'-O-methyl modified nucleotide
  source 1..21: mol_type = other RNA
tacatgtcacacatcttcctt

SEQ ID NO: 195 - RNA, 21 nt, synthetic construct
  misc_feature 1..21: note = Synthetic
  misc_feature 1: note = Nucleotide linked to an inverted abasic cap
  modified_base 7: mod_base = OTHER; note = 2'-O-methyl modified nucleotide
  modified_base 9: mod_base = OTHER; note = 2'-O-methyl modified nucleotide
  modified_base 11: mod_base = OTHER; note = 2'-O-methyl modified nucleotide
  modified_base 14: mod_base = OTHER; note = 2'-O-methyl modified nucleotide
  modified_base 16: mod_base = OTHER; note = 2'-O-methyl modified nucleotide
  modified_base 18: mod_base = OTHER; note = 2'-O-methyl modified nucleotide
  modified_base 20..21: mod_base = OTHER; note = 2'-O-methyl modified nucleotide
  modified_base 20..21: mod_base = OTHER; note = phosphorothioate linkage
  misc_feature 21: note = Nucleotide linked to an inverted abasic cap
  source 1..21: mol_type = other RNA
ggaagatgtgtgacatgtatt

SEQ ID NO: 196 - RNA, 21 nt, synthetic construct
  misc_feature 1..21: note = Synthetic
  modified_base 4: mod_base = OTHER; note = 2'-deoxy-2'-fluoro modified nucleotide
  modified_base 6: mod_base = OTHER; note = 2'-deoxy-2'-fluoro modified nucleotide
  modified_base 9: mod_base = OTHER; note = 2'-deoxy-2'-fluoro modified nucleotide
  modified_base 11: mod_base = OTHER; note = 2'-deoxy-2'-fluoro modified nucleotide
  modified_base 13: mod_base = OTHER; note = 2'-deoxy-2'-fluoro modified nucleotide
  modified_base 20..21: mod_base = OTHER; note = 2'-O-methyl modified nucleotide
  modified_base 20..21: mod_base = OTHER; note = phosphorothioate linkage
  source 1..21: mol_type = other RNA
tacatgtcacacatcttcctt

SEQ ID NO: 197 - DNA, 21 bp, synthetic construct
  misc_feature 1..21: note = Synthetic
  misc_feature 1..19: note = ribonucleotide unmodified or modified as described for this sequence
  misc_feature 1: note = Nucleotide linked to an inverted abasic cap
  modified_base 1: mod_base = OTHER; note = 2'-deoxy-2'-fluoro modified nucleotide
  modified_base 3: mod_base = OTHER; note = 2'-deoxy-2'-fluoro modified nucleotide
  modified_base 5: mod_base = OTHER; note = 2'-deoxy-2'-fluoro modified nucleotide
  modified_base 7: mod_base = OTHER; note = 2'-deoxy-2'-fluoro modified nucleotide
  modified_base 9: mod_base = OTHER; note = 2'-deoxy-2'-fluoro modified nucleotide
  modified_base 11..12: mod_base = OTHER; note = 2'-deoxy-2'-fluoro modified nucleotide
  modified_base 14..17: mod_base = OTHER; note = 2'-deoxy-2'-fluoro modified nucleotide
  misc_feature 21: note = Nucleotide linked to an inverted abasic cap
  source 1..21: mol_type = other DNA
  misc_feature 1: note = RNA
  misc_feature 2: note = DNA
  misc_feature 3: note = RNA
  misc_feature 4: note = DNA
  misc_feature 5: note = RNA
  misc_feature 6: note = DNA
  misc_feature 7: note = RNA
  misc_feature 8: note = DNA
  misc_feature 9: note = RNA
  misc_feature 10: note = DNA
  misc_feature 11..12: note = RNA
  misc_feature 13: note = DNA
  misc_feature 14..17: note = RNA
  misc_feature 18..21: note = DNA
catgtatatattatcttaatt

SEQ ID NO: 198 - RNA, 21 nt, synthetic construct
  misc_feature 1..21: note = Synthetic
  modified_base 4..6: mod_base = OTHER; note = 2'-O-methyl modified nucleotide
  modified_base 7: mod_base = OTHER; note = 2'-deoxy-2'-fluoro modified nucleotide
  modified_base 8..9: mod_base = OTHER; note = 2'-O-methyl modified nucleotide
  modified_base 10: mod_base = OTHER; note = 2'-deoxy-2'-fluoro modified nucleotide
  modified_base 11: mod_base = OTHER; note = 2'-O-methyl modified nucleotide
  modified_base 12: mod_base = OTHER; note = 2'-deoxy-2'-fluoro modified nucleotide
  modified_base 13: mod_base = OTHER; note = 2'-O-methyl modified nucleotide
  modified_base 14: mod_base = OTHER; note = 2'-deoxy-2'-fluoro modified nucleotide
  modified_base 15: mod_base = OTHER; note = 2'-O-methyl modified nucleotide
  modified_base 16: mod_base = OTHER; note = 2'-deoxy-2'-fluoro modified nucleotide
  modified_base 17: mod_base = OTHER; note = 2'-O-methyl modified nucleotide
  modified_base 18: mod_base = OTHER; note = 2'-deoxy-2'-fluoro modified nucleotide
  modified_base 19..21: mod_base = OTHER; note = 2'-O-methyl modified nucleotide
  source 1..21: mol_type = other RNA
ttaagataatatatacatgtt

SEQ ID NO: 199 - RNA, 21 nt, synthetic construct
  misc_feature 1..21: note = Synthetic
  modified_base 1..2: mod_base = OTHER; note = 2'-deoxy-2'-fluoro modified nucleotide
  modified_base 7: mod_base = OTHER; note = 2'-deoxy-2'-fluoro modified nucleotide
  modified_base 10: mod_base = OTHER; note = 2'-deoxy-2'-fluoro modified nucleotide
  modified_base 12: mod_base = OTHER; note = 2'-deoxy-2'-fluoro modified nucleotide
  modified_base 14: mod_base = OTHER; note = 2'-deoxy-2'-fluoro modified nucleotide
  modified_base 16: mod_base = OTHER; note = 2'-deoxy-2'-fluoro modified nucleotide
  modified_base 18: mod_base = OTHER; note = 2'-deoxy-2'-fluoro modified nucleotide
  modified_base 20..21: mod_base = OTHER; note = 2'-O-methyl modified nucleotide
  modified_base 20..21: mod_base = OTHER; note = phosphorothioate linkage
  source 1..21: mol_type = other RNA
ttaagataatatatacatgtt

SEQ ID NO: 200 - RNA, 21 nt, synthetic construct
  misc_feature 1..21: note = Synthetic
  misc_feature 1: note = Nucleotide linked to an inverted abasic cap
  modified_base 1: mod_base = OTHER; note = 2'-O-methyl modified nucleotide
  modified_base 3: mod_base = OTHER; note = 2'-O-methyl modified nucleotide
  modified_base 5: mod_base = OTHER; note = 2'-O-methyl modified nucleotide
  modified_base 7: mod_base = OTHER; note = 2'-O-methyl modified nucleotide
  modified_base 9: mod_base = OTHER; note = 2'-O-methyl modified nucleotide
  modified_base 11..12: mod_base = OTHER; note = 2'-O-methyl modified nucleotide
  modified_base 14..17: mod_base = OTHER; note = 2'-O-methyl modified nucleotide
  modified_base 20..21: mod_base = OTHER; note = 2'-O-methyl modified nucleotide
  modified_base 20..21: mod_base = OTHER; note = phosphorothioate linkage
  misc_feature 21: note = Nucleotide linked to an inverted abasic cap
  source 1..21: mol_type = other RNA
catgtatatattatcttaatt

SEQ ID NO: 201 - DNA, 21 bp, synthetic construct
  misc_feature 1..21: note = Synthetic
  misc_feature 1..19: note = ribonucleotide unmodified or modified as described for this sequence
  misc_feature 1: note = Nucleotide linked to an inverted abasic cap
  modified_base 1..2: mod_base = OTHER; note = 2'-deoxy-2'-fluoro modified nucleotide
  modified_base 5: mod_base = OTHER; note = 2'-deoxy-2'-fluoro modified nucleotide
  modified_base 8..10: mod_base = OTHER; note = 2'-deoxy-2'-fluoro modified nucleotide
  modified_base 14: mod_base = OTHER; note = 2'-deoxy-2'-fluoro modified nucleotide
  misc_feature 21: note = Nucleotide linked to an inverted abasic cap
  source 1..21: mol_type = other DNA
  misc_feature 1..2: note = RNA
  misc_feature 3..4: note = DNA
  misc_feature 5: note = RNA
  misc_feature 6..7: note = DNA
  misc_feature 8..10: note = RNA
  misc_feature 11..13: note = DNA
  misc_feature 14: note = RNA
  misc_feature 15..21: note = DNA
ttgataatccaaatggagatt

SEQ ID NO: 202 - RNA, 21 nt, synthetic construct
  misc_feature 1..21: note = Synthetic
  modified_base 4..5: mod_base = OTHER; note = 2'-deoxy-2'-fluoro modified nucleotide
  modified_base 6: mod_base = OTHER; note = 2'-O-methyl modified nucleotide
  modified_base 7..9: mod_base = OTHER; note = 2'-deoxy-2'-fluoro modified nucleotide
  modified_base 10..12: mod_base = OTHER; note = 2'-O-methyl modified nucleotide
  modified_base 13..14: mod_base = OTHER; note = 2'-deoxy-2'-fluoro modified nucleotide
  modified_base 15: mod_base = OTHER; note = 2'-O-methyl modified nucleotide
  modified_base 16..17: mod_base = OTHER; note = 2'-deoxy-2'-fluoro modified nucleotide
  modified_base 18..21: mod_base = OTHER; note = 2'-O-methyl modified nucleotide
  source 1..21: mol_type = other RNA
tctccatttggattatcaatt

SEQ ID NO: 203 - DNA, 21 bp, synthetic construct
  misc_feature 1..21: note = Synthetic
  misc_feature 1..19: note = ribonucleotide unmodified or modified as described for this sequence
  misc_feature 1: note = Nucleotide linked to an inverted abasic cap
  modified_base 2: mod_base = OTHER; note = 2'-deoxy-2'-fluoro modified nucleotide
  modified_base 4..5: mod_base = OTHER; note = 2'-deoxy-2'-fluoro modified nucleotide
  modified_base 7: mod_base = OTHER; note = 2'-deoxy-2'-fluoro modified nucleotide
  modified_base 9..10: mod_base = OTHER; note = 2'-deoxy-2'-fluoro modified nucleotide
  modified_base 13: mod_base = OTHER; note = 2'-deoxy-2'-fluoro modified nucleotide
  modified_base 16..18: mod_base = OTHER; note = 2'-deoxy-2'-fluoro modified nucleotide
  misc_feature 21: note = Nucleotide linked to an inverted abasic cap
  source 1..21: mol_type = other DNA
  misc_feature 1: note = DNA
  misc_feature 2: note = RNA
  misc_feature 3: note = DNA
  misc_feature 4..5: note = RNA
  misc_feature 6: note = DNA
  misc_feature 7: note = RNA
  misc_feature 8: note = DNA
  misc_feature 9..10: note = RNA
  misc_feature 11..12: note = DNA
  misc_feature 13: note = RNA
  misc_feature 14..15: note = DNA
  misc_feature 16..18: note = RNA
  misc_feature 19..21: note = DNA
acgtcatgttgataatccatt

SEQ ID NO: 204 - RNA, 21 nt, synthetic construct
  misc_feature 1..21: note = Synthetic
  modified_base 4: mod_base = OTHER; note = 2'-O-methyl modified nucleotide
  modified_base 5..6: mod_base = OTHER; note = 2'-deoxy-2'-fluoro modified nucleotide
  modified_base 7: mod_base = OTHER; note = 2'-O-methyl modified nucleotide
  modified_base 8..9: mod_base = OTHER; note = 2'-deoxy-2'-fluoro modified nucleotide
  modified_base 10..11: mod_base = OTHER; note = 2'-O-methyl modified nucleotide
  modified_base 12: mod_base = OTHER; note = 2'-deoxy-2'-fluoro modified nucleotide
  modified_base 13: mod_base = OTHER; note = 2'-O-methyl modified nucleotide
  modified_base 14: mod_base = OTHER; note = 2'-deoxy-2'-fluoro modified nucleotide
  modified_base 15..16: mod_base = OTHER; note = 2'-O-methyl modified nucleotide
  modified_base 17: mod_base = OTHER; note = 2'-deoxy-2'-fluoro modified nucleotide
  modified_base 18: mod_base = OTHER; note = 2'-O-methyl modified nucleotide
  modified_base 19: mod_base = OTHER; note = 2'-deoxy-2'-fluoro modified nucleotide
  modified_base 20..21: mod_base = OTHER; note = 2'-O-methyl modified nucleotide
  source 1..21: mol_type = other RNA
tggattatcaacatgacgttt

SEQ ID NO: 205 - RNA, 21 nt, synthetic construct
  misc_feature 1..21: note = Synthetic
  modified_base 1: mod_base = OTHER; note = 2'-deoxy-2'-fluoro modified nucleotide
  modified_base 3: mod_base = OTHER; note = 2'-deoxy-2'-fluoro modified nucleotide
  modified_base 5: mod_base = OTHER; note = 2'-deoxy-2'-fluoro modified nucleotide
  modified_base 7: mod_base = OTHER; note = 2'-deoxy-2'-fluoro modified nucleotide
  modified_base 9: mod_base = OTHER; note = 2'-deoxy-2'-fluoro modified nucleotide
  modified_base 11..12: mod_base = OTHER; note = 2'-deoxy-2'-fluoro modified nucleotide
  modified_base 14: mod_base = OTHER; note = 2'-deoxy-2'-fluoro modified nucleotide
  modified_base 16: mod_base = OTHER; note = 2'-deoxy-2'-fluoro modified nucleotide
  modified_base 18..19: mod_base = OTHER; note = 2'-deoxy-2'-fluoro modified nucleotide
  modified_base 20..21: mod_base = OTHER; note = 2'-O-methyl modified nucleotide
  modified_base 20..21: mod_base = OTHER; note = phosphorothioate linkage
  source 1..21: mol_type = other RNA
tatatacatgtcacacatctt

SEQ ID NO: 206 - RNA, 21 nt, synthetic construct
  misc_feature 1..21: note = Synthetic
  misc_feature 1: note = Nucleotide linked to an inverted abasic cap
  modified_base 1: mod_base = OTHER; note = 2'-O-methyl modified nucleotide
  modified_base 3: mod_base = OTHER; note = 2'-O-methyl modified nucleotide
  modified_base 5: mod_base = OTHER; note = 2'-O-methyl modified nucleotide
  modified_base 8: mod_base = OTHER; note = 2'-O-methyl modified nucleotide
  modified_base 10: mod_base = OTHER; note = 2'-O-methyl modified nucleotide
  modified_base 12: mod_base = OTHER; note = 2'-O-methyl modified nucleotide
  modified_base 14: mod_base = OTHER; note = 2'-O-methyl modified nucleotide
  modified_base 16: mod_base = OTHER; note = 2'-O-methyl modified nucleotide
  modified_base 18..21: mod_base = OTHER; note = 2'-O-methyl modified nucleotide
  modified_base 20..21: mod_base = OTHER; note = phosphorothioate linkage
  misc_feature 21: note = Nucleotide linked to an inverted abasic cap
  source 1..21: mol_type = other RNA
tgtgtgacatgtatatatttt

SEQ ID NO: 207 - RNA, 21 nt, synthetic construct
  misc_feature 1..21: note = Synthetic
  modified_base 4: mod_base = OTHER; note = 2'-deoxy-2'-fluoro modified nucleotide
  modified_base 6: mod_base = OTHER; note = 2'-deoxy-2'-fluoro modified nucleotide
  modified_base 8: mod_base = OTHER; note = 2'-deoxy-2'-fluoro modified nucleotide
  modified_base 10: mod_base = OTHER; note = 2'-deoxy-2'-fluoro modified nucleotide
  modified_base 12: mod_base = OTHER; note = 2'-deoxy-2'-fluoro modified nucleotide
  modified_base 15: mod_base = OTHER; note = 2'-deoxy-2'-fluoro modified nucleotide
  modified_base 17: mod_base = OTHER; note = 2'-deoxy-2'-fluoro modified nucleotide
  modified_base 19: mod_base = OTHER; note = 2'-deoxy-2'-fluoro modified nucleotide
  modified_base 20..21: mod_base = OTHER; note = 2'-O-methyl modified nucleotide
  modified_base 20..21: mod_base = OTHER; note = phosphorothioate linkage
  source 1..21: mol_type = other RNA
aatatatacatgtcacacatt

SEQ ID NO: 208 - RNA, 21 nt, synthetic construct
  misc_feature 1..21: note = Synthetic
  misc_feature 1: note = Nucleotide linked to an inverted abasic cap
  modified_base 2: mod_base = OTHER; note = 2'-O-methyl modified nucleotide
  modified_base 4: mod_base = OTHER; note = 2'-O-methyl modified nucleotide
  modified_base 6..7: mod_base = OTHER; note = 2'-O-methyl modified nucleotide
  modified_base 9: mod_base = OTHER; note = 2'-O-methyl modified nucleotide
  modified_base 11: mod_base = OTHER; note = 2'-O-methyl modified nucleotide
  modified_base 13: mod_base = OTHER; note = 2'-O-methyl modified nucleotide
  modified_base 15: mod_base = OTHER; note = 2'-O-methyl modified nucleotide
  modified_base 17: mod_base = OTHER; note = 2'-O-methyl modified nucleotide
  modified_base 20..21: mod_base = OTHER; note = 2'-O-methyl modified nucleotide
  modified_base 20..21: mod_base = OTHER; note = phosphorothioate linkage
  misc_feature 21: note = Nucleotide linked to an inverted abasic cap
  source 1..21: mol_type = other RNA
tgtgtgacatgtatatatttt

SEQ ID NO: 209 - RNA, 21 nt, synthetic construct
  misc_feature 1..21: note = Synthetic
  misc_feature 1: note = Nucleotide linked to an inverted abasic cap
  modified_base 3..4: mod_base = OTHER; note = 2'-O-methyl modified nucleotide
  modified_base 6..7: mod_base = OTHER; note = 2'-O-methyl modified nucleotide
  modified_base 11..13: mod_base = OTHER; note = 2'-O-methyl modified nucleotide
  modified_base 15..21: mod_base = OTHER; note = 2'-O-methyl modified nucleotide
  modified_base 20..21: mod_base = OTHER; note = phosphorothioate linkage
  misc_feature 21: note = Nucleotide linked to an inverted abasic cap
  source 1..21: mol_type = other RNA
ttgataatccaaatggagatt

SEQ ID NO: 210 - RNA, 21 nt, synthetic construct
  misc_feature 1..21: note = Synthetic
  modified_base 4..5: mod_base = OTHER; note = 2'-deoxy-2'-fluoro modified nucleotide
  modified_base 6: mod_base = OTHER; note = 2'-O-methyl modified nucleotide
  modified_base 7..9: mod_base = OTHER; note = 2'-deoxy-2'-fluoro modified nucleotide
  modified_base 10..12: mod_base = OTHER; note = 2'-O-methyl modified nucleotide
  modified_base 13..14: mod_base = OTHER; note = 2'-deoxy-2'-fluoro modified nucleotide
  modified_base 15: mod_base = OTHER; note = 2'-O-methyl modified nucleotide
  modified_base 16..17: mod_base = OTHER; note = 2'-deoxy-2'-fluoro modified nucleotide
  modified_base 18..21: mod_base = OTHER; note = 2'-O-methyl modified nucleotide
  modified_base 20..21: mod_base = OTHER; note = phosphorothioate linkage
  source 1..21: mol_type = other RNA
tctccatttggattatcaatt

SEQ ID NO: 211 - RNA, 21 nt, synthetic construct
  misc_feature 1..21: note = Synthetic
  modified_base 6: mod_base = OTHER; note = 2'-O-methyl modified nucleotide
  modified_base 8: mod_base = OTHER; note = 2'-O-methyl modified nucleotide
  modified_base 10: mod_base = OTHER; note = 2'-O-methyl modified nucleotide
  modified_base 17: mod_base = OTHER; note = 2'-O-methyl modified nucleotide
  modified_base 20..21: mod_base = OTHER; note = 2'-O-methyl modified nucleotide
  modified_base 20..21: mod_base = OTHER; note = phosphorothioate linkage
  source 1..21: mol_type = other RNA
atgtcacacatcttccatctt

SEQ ID NO: 212 - DNA, 21 bp, synthetic construct
  misc_feature 1..21: note = Synthetic
  misc_feature 1..19: note = ribonucleotide unmodified or modified as described for this sequence
  misc_feature 1: note = Nucleotide linked to an inverted abasic cap
  modified_base 1: mod_base = OTHER; note = 2'-deoxy-2'-fluoro modified nucleotide
  modified_base 8: mod_base = OTHER; note = 2'-deoxy-2'-fluoro modified nucleotide
  modified_base 10: mod_base = OTHER; note = 2'-deoxy-2'-fluoro modified nucleotide
  modified_base 12: mod_base = OTHER; note = 2'-deoxy-2'-fluoro modified nucleotide
  modified_base 15: mod_base = OTHER; note = 2'-deoxy-2'-fluoro modified nucleotide
  modified_base 17: mod_base = OTHER; note = 2'-deoxy-2'-fluoro modified nucleotide
  modified_base 19: mod_base = OTHER; note = 2'-deoxy-2'-fluoro modified nucleotide
  misc_feature 21: note = Nucleotide linked to an inverted abasic cap
  source 1..21: mol_type = other DNA
  misc_feature 1: note = RNA
  misc_feature 2..7: note = DNA
  misc_feature 8: note = RNA
  misc_feature 9: note = DNA
  misc_feature 10: note = RNA
  misc_feature 11: note = DNA
  misc_feature 12: note = RNA
  misc_feature 13..14: note = DNA
  misc_feature 15: note = RNA
  misc_feature 16: note = DNA
  misc_feature 17: note = RNA
  misc_feature 18: note = DNA
  misc_feature 19: note = RNA
  misc_feature 20..21: note = DNA
tggaagatgtgtgacatgttt

SEQ ID NO: 213 - RNA, 21 nt, synthetic construct
  misc_feature 1..21: note = Synthetic
  modified_base 4: mod_base = OTHER; note = 2'-deoxy-2'-fluoro modified nucleotide
  modified_base 5: mod_base = OTHER; note = 2'-O-methyl modified nucleotide
  modified_base 6..7: mod_base = OTHER; note = 2'-deoxy-2'-fluoro modified nucleotide
  modified_base 8: mod_base = OTHER; note = 2'-O-methyl modified nucleotide
  modified_base 9: mod_base = OTHER; note = 2'-deoxy-2'-fluoro modified nucleotide
  modified_base 10: mod_base = OTHER; note = 2'-O-methyl modified nucleotide
  modified_base 11: mod_base = OTHER; note = 2'-deoxy-2'-fluoro modified nucleotide
  modified_base 12: mod_base = OTHER; note = 2'-O-methyl modified nucleotide
  modified_base 13..18: mod_base = OTHER; note = 2'-deoxy-2'-fluoro modified nucleotide
  modified_base 19..21: mod_base = OTHER; note = 2'-O-methyl modified nucleotide
  source 1..21: mol_type = other RNA
acatgtcacacatcttccatt

SEQ ID NO: 214 - RNA, 21 nt, synthetic construct
  misc_feature 1..21: note = Synthetic
  misc_feature 1: note = Nucleotide linked to an inverted abasic cap
  modified_base 1..6: mod_base = OTHER; note = 2'-O-methyl modified nucleotide
  modified_base 8: mod_base = OTHER; note = 2'-O-methyl modified nucleotide
  modified_base 10: mod_base = OTHER; note = 2'-O-methyl modified nucleotide
  modified_base 12..13: mod_base = OTHER; note = 2'-O-methyl modified nucleotide
  modified_base 15: mod_base = OTHER; note = 2'-O-methyl modified nucleotide
  modified_base 17: mod_base = OTHER; note = 2'-O-methyl modified nucleotide
  modified_base 19..21: mod_base = OTHER; note = 2'-O-methyl modified nucleotide
  modified_base 20..21: mod_base = OTHER; note = phosphorothioate linkage
  misc_feature 21: note = Nucleotide linked to an inverted abasic cap
  source 1..21: mol_type = other RNA
ggaagatgtgtgacatgtatt

SEQ ID NO: 215 - RNA, 21 nt, synthetic construct
  misc_feature 1..21: note = Synthetic
  modified_base 4: mod_base = OTHER; note = 2'-O-methyl modified nucleotide
  modified_base 5: mod_base = OTHER; note = 2'-deoxy-2'-fluoro modified nucleotide
  modified_base 6: mod_base = OTHER; note = 2'-O-methyl modified nucleotide
  modified_base 7..8: mod_base = OTHER; note = 2'-deoxy-2'-fluoro modified nucleotide
  modified_base 9: mod_base = OTHER; note = 2'-O-methyl modified nucleotide
  modified_base 10: mod_base = OTHER; note = 2'-deoxy-2'-fluoro modified nucleotide
  modified_base 11: mod_base = OTHER; note = 2'-O-methyl modified nucleotide
  modified_base 12: mod_base = OTHER; note = 2'-deoxy-2'-fluoro modified nucleotide
  modified_base 13: mod_base = OTHER; note = 2'-O-methyl modified nucleotide
  modified_base 14..19: mod_base = OTHER; note = 2'-deoxy-2'-fluoro modified nucleotide
  modified_base 20..21: mod_base = OTHER; note = 2'-O-methyl modified nucleotide
  modified_base 20..21: mod_base = OTHER; note = phosphorothioate linkage
  source 1..21: mol_type = other RNA
tacatgtcacacatcttcctt

SEQ ID NO: 216 - RNA, 21 nt, synthetic construct
  misc_feature 1..21: note = Synthetic
  misc_feature 1: note = Nucleotide linked to an inverted abasic cap
  modified_base 1: mod_base = OTHER; note = 2'-deoxy-2'-fluoro modified nucleotide
  modified_base 3: mod_base = OTHER; note = 2'-deoxy-2'-fluoro modified nucleotide
  modified_base 5: mod_base = OTHER; note = 2'-deoxy-2'-fluoro modified nucleotide
  modified_base 7: mod_base = OTHER; note = 2'-deoxy-2'-fluoro modified nucleotide
  modified_base 9: mod_base = OTHER; note = 2'-deoxy-2'-fluoro modified nucleotide
  modified_base 11..12: mod_base = OTHER; note = 2'-deoxy-2'-fluoro modified nucleotide
  modified_base 14..17: mod_base = OTHER; note = 2'-deoxy-2'-fluoro modified nucleotide
  modified_base 20..21: mod_base = OTHER; note = 2'-O-methyl modified nucleotide
  modified_base 20..21: mod_base = OTHER; note = phosphorothioate linkage
  misc_feature 21: note = Nucleotide linked to an inverted abasic cap
  source 1..21: mol_type = other RNA
catgtatatattatcttaatt

SEQ ID NO: 217 - DNA, 21 bp, synthetic construct
  misc_feature 1..21: note = Synthetic
  misc_feature 1..19: note = ribonucleotide unmodified or modified as described for this sequence
  misc_feature 1: note = Nucleotide linked to an inverted abasic cap
  modified_base 3: mod_base = OTHER; note = 2'-deoxy-2'-fluoro modified nucleotide
  modified_base 10: mod_base = OTHER; note = 2'-deoxy-2'-fluoro modified nucleotide
  modified_base 12: mod_base = OTHER; note = 2'-deoxy-2'-fluoro modified nucleotide
  modified_base 14: mod_base = OTHER; note = 2'-deoxy-2'-fluoro modified nucleotide
  modified_base 17: mod_base = OTHER; note = 2'-deoxy-2'-fluoro modified nucleotide
  modified_base 19: mod_base = OTHER; note = 2'-deoxy-2'-fluoro modified nucleotide
  misc_feature 21: note = Nucleotide linked to an inverted abasic cap
  source 1..21: mol_type = other DNA
  misc_feature 1..2: note = DNA
  misc_feature 3: note = RNA
  misc_feature 4..9: note = DNA
  misc_feature 10: note = RNA
  misc_feature 11: note = DNA
  misc_feature 12: note = RNA
  misc_feature 13: note = DNA
  misc_feature 14: note = RNA
  misc_feature 15..16: note = DNA
  misc_feature 17: note = RNA
  misc_feature 18: note = DNA
  misc_feature 19: note = RNA
  misc_feature 20..21: note = DNA
gatggaagatgtgtgacattt

SEQ ID NO: 218 - RNA, 21 nt, synthetic construct
  misc_feature 1..21: note = Synthetic
  modified_base 4..5: mod_base = OTHER; note = 2'-deoxy-2'-fluoro modified nucleotide
  modified_base 6: mod_base = OTHER; note = 2'-O-methyl modified nucleotide
  modified_base 7: mod_base = OTHER; note = 2'-deoxy-2'-fluoro modified nucleotide
  modified_base 8: mod_base = OTHER; note = 2'-O-methyl modified nucleotide
  modified_base 9: mod_base = OTHER; note = 2'-deoxy-2'-fluoro modified nucleotide
  modified_base 10: mod_base = OTHER; note = 2'-O-methyl modified nucleotide
  modified_base 11..16: mod_base = OTHER; note = 2'-deoxy-2'-fluoro modified nucleotide
  modified_base 17: mod_base = OTHER; note = 2'-O-methyl modified nucleotide
  modified_base 18..19: mod_base = OTHER; note = 2'-deoxy-2'-fluoro modified nucleotide
  modified_base 20..21: mod_base = OTHER; note = 2'-O-methyl modified nucleotide
  source 1..21: mol_type = other RNA
atgtcacacatcttccatctt

SEQ ID NO: 219 - RNA, 21 nt, synthetic construct
  misc_feature 1..21: note = Synthetic
  modified_base 4..5: mod_base = OTHER; note = 2'-deoxy-2'-fluoro modified nucleotide
  modified_base 6: mod_base = OTHER; note = 2'-O-methyl modified nucleotide
  modified_base 7: mod_base = OTHER; note = 2'-deoxy-2'-fluoro modified nucleotide
  modified_base 8: mod_base = OTHER; note = 2'-O-methyl modified nucleotide
  modified_base 9: mod_base = OTHER; note = 2'-deoxy-2'-fluoro modified nucleotide
  modified_base 10: mod_base = OTHER; note = 2'-O-methyl modified nucleotide
  modified_base 11..16: mod_base = OTHER; note = 2'-deoxy-2'-fluoro modified nucleotide
  modified_base 17: mod_base = OTHER; note = 2'-O-methyl modified nucleotide
  modified_base 18..19: mod_base = OTHER; note = 2'-deoxy-2'-fluoro modified nucleotide
  modified_base 20..21: mod_base = OTHER; note = 2'-O-methyl modified nucleotide
  modified_base 20..21: mod_base = OTHER; note = phosphorothioate linkage
  source 1..21: mol_type = other RNA
atgtcacacatcttccatctt

SEQ ID NO: 220 - DNA, 21 bp, synthetic construct
  misc_feature 1..21: note = Synthetic
  misc_feature 1..19: note = ribonucleotide unmodified or modified as described for this sequence
  misc_feature 1: note = Nucleotide linked to an inverted abasic cap
  modified_base 2: mod_base = OTHER; note = 2'-deoxy-2'-fluoro modified nucleotide
  modified_base 4: mod_base = OTHER; note = 2'-deoxy-2'-fluoro modified nucleotide
  modified_base 7: mod_base = OTHER; note = 2'-deoxy-2'-fluoro modified nucleotide
  modified_base 9: mod_base = OTHER; note = 2'-deoxy-2'-fluoro modified nucleotide
  modified_base 11: mod_base = OTHER; note = 2'-deoxy-2'-fluoro modified nucleotide
  modified_base 13: mod_base = OTHER; note = 2'-deoxy-2'-fluoro modified nucleotide
  modified_base 15: mod_base = OTHER; note = 2'-deoxy-2'-fluoro modified nucleotide
  modified_base 17..18: mod_base = OTHER; note = 2'-deoxy-2'-fluoro modified nucleotide
  misc_feature 21: note = Nucleotide linked to an inverted abasic cap
  source 1..21: mol_type = other DNA
  misc_feature 1: note = DNA
  misc_feature 2: note = RNA
  misc_feature 3: note = DNA
  misc_feature 4: note = RNA
  misc_feature 5..6: note = DNA
  misc_feature 7: note = RNA
  misc_feature 8: note = DNA
  misc_feature 9: note = RNA
  misc_feature 10: note = DNA
  misc_feature 11: note = RNA
  misc_feature 12: note = DNA
  misc_feature 13: note = RNA
  misc_feature 14: note = DNA
  misc_feature 15: note = RNA
  misc_feature 16: note = DNA
  misc_feature 17..18: note = RNA
  misc_feature 19..21: note = DNA
gtgtgacatgtatatattatt

SEQ ID NO: 221 - RNA, 21 nt, synthetic construct
  misc_feature 1..21: note = Synthetic
  modified_base 4: mod_base = OTHER; note = 2'-deoxy-2'-fluoro modified nucleotide
  modified_base 5: mod_base = OTHER; note = 2'-O-methyl modified nucleotide
  modified_base 6: mod_base = OTHER; note = 2'-deoxy-2'-fluoro modified nucleotide
  modified_base 7: mod_base = OTHER; note = 2'-O-methyl modified nucleotide
  modified_base 8: mod_base = OTHER; note = 2'-deoxy-2'-fluoro modified nucleotide
  modified_base 9: mod_base = OTHER; note = 2'-O-methyl modified nucleotide
  modified_base 10: mod_base = OTHER; note = 2'-deoxy-2'-fluoro modified nucleotide
  modified_base 11: mod_base = OTHER; note = 2'-O-methyl modified nucleotide
  modified_base 12: mod_base = OTHER; note = 2'-deoxy-2'-fluoro modified nucleotide
  modified_base 13: mod_base = OTHER; note = 2'-O-methyl modified nucleotide
  modified_base 14..15: mod_base = OTHER; note = 2'-deoxy-2'-fluoro modified nucleotide
  modified_base 16: mod_base = OTHER; note = 2'-O-methyl modified nucleotide
  modified_base 17: mod_base = OTHER; note = 2'-deoxy-2'-fluoro modified nucleotide
  modified_base 18: mod_base = OTHER; note = 2'-O-methyl modified nucleotide
  modified_base 19: mod_base = OTHER; note = 2'-deoxy-2'-fluoro modified nucleotide
  modified_base 20..21: mod_base = OTHER; note = 2'-O-methyl modified nucleotide
  source 1..21: mol_type = other RNA
taatatatacatgtcacactt

SEQ ID NO: 222 - DNA, 21 bp, synthetic construct
  misc_feature 1..21: note = Synthetic
  misc_feature 1..19: note = ribonucleotide unmodified or modified as described for this sequence
  misc_feature 1: note = Nucleotide linked to an inverted abasic cap
  modified_base 1: mod_base = OTHER; note = 2'-deoxy-2'-fluoro modified nucleotide
  modified_base 3: mod_base = OTHER; note = 2'-deoxy-2'-fluoro modified nucleotide
  modified_base 5: mod_base = OTHER; note = 2'-deoxy-2'-fluoro modified nucleotide
  modified_base 8: mod_base = OTHER; note = 2'-deoxy-2'-fluoro modified nucleotide
  modified_base 10: mod_base = OTHER; note = 2'-deoxy-2'-fluoro modified nucleotide
  modified_base 12: mod_base = OTHER; note = 2'-deoxy-2'-fluoro modified nucleotide
  modified_base 14: mod_base = OTHER; note = 2'-deoxy-2'-fluoro modified nucleotide
  modified_base 16: mod_base = OTHER; note = 2'-deoxy-2'-fluoro modified nucleotide
  modified_base 18..19: mod_base = OTHER; note = 2'-deoxy-2'-fluoro modified nucleotide
  misc_feature 21: note = Nucleotide linked to an inverted abasic cap
  source 1..21: mol_type = other DNA
  misc_feature 1: note = RNA
  misc_feature 2: note = DNA
  misc_feature 3: note = RNA
  misc_feature 4: note = DNA
  misc_feature 5: note = RNA
  misc_feature 6..7: note = DNA
  misc_feature 8: note = RNA
  misc_feature 9: note = DNA
  misc_feature 10: note = RNA
  misc_feature 11: note = DNA
  misc_feature 12: note = RNA
  misc_feature 13: note = DNA
  misc_feature 14: note = RNA
  misc_feature 15: note = DNA
  misc_feature 16: note = RNA
  misc_feature 17: note = DNA
  misc_feature 18..19: note = RNA
  misc_feature 20..21: note = DNA
tgtgtgacatgtatatatttt

SEQ ID NO: 223 - RNA, 21 nt, synthetic construct
  misc_feature 1..21: note = Synthetic
  modified_base 4: mod_base = OTHER; note = 2'-O-methyl modified nucleotide
  modified_base 5: mod_base = OTHER; note = 2'-deoxy-2'-fluoro modified nucleotide
  modified_base 6: mod_base = OTHER; note = 2'-O-methyl modified nucleotide
  modified_base 7: mod_base = OTHER; note = 2'-deoxy-2'-fluoro modified nucleotide
  modified_base 8: mod_base = OTHER; note = 2'-O-methyl modified nucleotide
  modified_base 9: mod_base = OTHER; note = 2'-deoxy-2'-fluoro modified nucleotide
  modified_base 10: mod_base = OTHER; note = 2'-O-methyl modified nucleotide
  modified_base 11: mod_base = OTHER; note = 2'-deoxy-2'-fluoro modified nucleotide
  modified_base 12: mod_base = OTHER; note = 2'-O-methyl modified nucleotide
  modified_base 13..14: mod_base = OTHER; note = 2'-deoxy-2'-fluoro modified nucleotide
  modified_base 15: mod_base = OTHER; note = 2'-O-methyl modified nucleotide
  modified_base 16: mod_base = OTHER; note = 2'-deoxy-2'-fluoro modified nucleotide
  modified_base 17: mod_base = OTHER; note = 2'-O-methyl modified nucleotide
  modified_base 18: mod_base = OTHER; note = 2'-deoxy-2'-fluoro modified nucleotide
  modified_base 19..21: mod_base = OTHER; note = 2'-O-methyl modified nucleotide
  source 1..21: mol_type = other RNA
aatatatacatgtcacacatt

SEQ ID NO: 224 - RNA, 21 nt, synthetic construct
  misc_feature 1..21: note = Synthetic
  modified_base 4..5: mod_base = OTHER; note = 2'-O-methyl modified nucleotide
  modified_base 7: mod_base = OTHER; note = 2'-O-methyl modified nucleotide
  modified_base 9: mod_base = OTHER; note = 2'-O-methyl modified nucleotide
  modified_base 11..13: mod_base = OTHER; note = 2'-O-methyl modified nucleotide
  modified_base 15..16: mod_base = OTHER; note = 2'-O-methyl modified nucleotide
  modified_base 18..21: mod_base = OTHER; note = 2'-O-methyl modified nucleotide
  modified_base 20..21: mod_base = OTHER; note = phosphorothioate linkage
  source 1..21: mol_type = other RNA
atgtcacacatcttccatctt

SEQ ID NO: 225 - RNA, 21 nt, synthetic construct
  misc_feature 1..21: note = Synthetic
  misc_feature 1: note = Nucleotide linked to an inverted abasic cap
  modified_base 1: mod_base = OTHER; note = 2'-O-methyl modified nucleotide
  modified_base 3: mod_base = OTHER; note = 2'-O-methyl modified nucleotide
  modified_base 5..6: mod_base = OTHER; note = 2'-O-methyl modified nucleotide
  modified_base 8: mod_base = OTHER; note = 2'-O-methyl modified nucleotide
  modified_base 10: mod_base = OTHER; note = 2'-O-methyl modified nucleotide
  modified_base 12: mod_base = OTHER; note = 2'-O-methyl modified nucleotide
  modified_base 14: mod_base = OTHER; note = 2'-O-methyl modified nucleotide
  modified_base 16: mod_base = OTHER; note = 2'-O-methyl modified nucleotide
  modified_base 19..21: mod_base = OTHER; note = 2'-O-methyl modified nucleotide
  modified_base 20..21: mod_base = OTHER; note = phosphorothioate linkage
  misc_feature 21: note = Nucleotide linked to an inverted abasic cap
  source 1..21: mol_type = other RNA
gtgtgacatgtatatattatt

SEQ ID NO: 226 - RNA, 21 nt, synthetic construct
  misc_feature 1..21: note = Synthetic
  modified_base 4: mod_base = OTHER; note = 2'-O-methyl modified nucleotide
  modified_base 6: mod_base = OTHER; note = 2'-O-methyl modified nucleotide
  modified_base 8: mod_base = OTHER; note = 2'-O-methyl modified nucleotide
  modified_base 10: mod_base = OTHER; note = 2'-O-methyl modified nucleotide
  modified_base 12: mod_base = OTHER; note = 2'-O-methyl modified nucleotide
  modified_base 15: mod_base = OTHER; note = 2'-O-methyl modified nucleotide
  modified_base 17: mod_base = OTHER; note = 2'-O-methyl modified nucleotide
  modified_base 19..21: mod_base = OTHER; note = 2'-O-methyl modified nucleotide
  modified_base 20..21: mod_base = OTHER; note = phosphorothioate linkage
  source 1..21: mol_type = other RNA
aatatatacatgtcacacatt

SEQ ID NO: 227 - RNA, 21 nt, synthetic construct
  misc_feature 1..21: note = Synthetic
  misc_feature 1: note = Nucleotide linked to an inverted abasic cap
  modified_base 2: mod_base = OTHER; note = 2'-O-methyl modified nucleotide
  modified_base 4: mod_base = OTHER; note = 2'-O-methyl modified nucleotide
  modified_base 6: mod_base = OTHER; note = 2'-O-methyl modified nucleotide
  modified_base 8: mod_base = OTHER; note = 2'-O-methyl modified nucleotide
  modified_base 10: mod_base = OTHER; note = 2'-O-methyl modified nucleotide
  modified_base 13: mod_base = OTHER; note = 2'-O-methyl modified nucleotide
  modified_base 18..21: mod_base = OTHER; note = 2'-O-methyl modified nucleotide
  modified_base 20..21: mod_base = OTHER; note = phosphorothioate linkage
  misc_feature 21: note = Nucleotide linked to an inverted abasic cap
  source 1..21: mol_type = other RNA
catgtatatattatcttaatt

SEQ ID NO: 228 - RNA, 21 nt, synthetic construct
  misc_feature 1..21: note = Synthetic
  modified_base 1..5: mod_base = OTHER; note = 2'-deoxy-2'-fluoro modified nucleotide
  modified_base 7..9: mod_base = OTHER; note = 2'-deoxy-2'-fluoro modified nucleotide
  modified_base 13..14: mod_base = OTHER; note = 2'-deoxy-2'-fluoro modified nucleotide
  modified_base 16..17: mod_base = OTHER; note = 2'-deoxy-2'-fluoro modified nucleotide
  modified_base 20..21: mod_base = OTHER; note = 2'-O-methyl modified nucleotide
  modified_base 20..21: mod_base = OTHER; note = phosphorothioate linkage
  source 1..21: mol_type = other RNA
tctccatttggattatcaatt

SEQ ID NO: 229 - RNA, 21 nt, synthetic construct
  misc_feature 1..21: note = Synthetic
  misc_feature 1: note = Nucleotide linked to an inverted abasic cap
  modified_base 1..2: mod_base = OTHER; note = 2'-O-methyl modified nucleotide
  modified_base 5: mod_base = OTHER; note = 2'-O-methyl modified nucleotide
  modified_base 8..10: mod_base = OTHER; note = 2'-O-methyl modified nucleotide
  modified_base 14: mod_base = OTHER; note = 2'-O-methyl modified nucleotide
  modified_base 20..21: mod_base = OTHER; note = 2'-O-methyl modified nucleotide
  modified_base 20..21: mod_base = OTHER; note = phosphorothioate linkage
  misc_feature 21: note = Nucleotide linked to an inverted abasic cap
  source 1..21: mol_type = other RNA
ttgataatccaaatggagatt

SEQ ID NO: 230 - DNA, 21 bp, synthetic construct
  misc_feature 1..21: note = Synthetic
  misc_feature 1..19: note = ribonucleotide unmodified or modified as described for this sequence
  misc_feature 1: note = Nucleotide linked to an inverted abasic cap
  modified_base 1: mod_base = OTHER; note = 2'-deoxy-2'-fluoro modified nucleotide
  modified_base 3: mod_base = OTHER; note = 2'-deoxy-2'-fluoro modified nucleotide
  modified_base 5: mod_base = OTHER; note = 2'-deoxy-2'-fluoro modified nucleotide
  modified_base 7: mod_base = OTHER; note = 2'-deoxy-2'-fluoro modified nucleotide
  modified_base 9: mod_base = OTHER; note = 2'-deoxy-2'-fluoro modified nucleotide
  modified_base 11..12: mod_base = OTHER; note = 2'-deoxy-2'-fluoro modified nucleotide
  modified_base 14..17: mod_base = OTHER; note = 2'-deoxy-2'-fluoro modified nucleotide
  modified_base 20..21: mod_base = OTHER; note = phosphorothioate linkage
  misc_feature 21: note = Nucleotide linked to an inverted abasic cap
  source 1..21: mol_type = other DNA
  misc_feature 1: note = RNA
  misc_feature 2: note = DNA
  misc_feature 3: note = RNA
  misc_feature 4: note = DNA
  misc_feature 5: note = RNA
  misc_feature 6: note = DNA
  misc_feature 7: note = RNA
  misc_feature 8: note = DNA
  misc_feature 9: note = RNA
  misc_feature 10: note = DNA
  misc_feature 11..12: note = RNA
  misc_feature 13: note = DNA
  misc_feature 14..17: note = RNA
  misc_feature 18..21: note = DNA
catgtatatattatcttaatt

SEQ ID NO: 231 - RNA, 21 nt, synthetic construct
  misc_feature 1..21: note = Synthetic
  modified_base 4..6: mod_base = OTHER; note = 2'-O-methyl modified nucleotide
  modified_base 7: mod_base = OTHER; note = 2'-deoxy-2'-fluoro modified nucleotide
  modified_base 8..9: mod_base = OTHER; note = 2'-O-methyl modified nucleotide
  modified_base 10: mod_base = OTHER; note = 2'-deoxy-2'-fluoro modified nucleotide
  modified_base 11: mod_base = OTHER; note = 2'-O-methyl modified nucleotide
  modified_base 12: mod_base = OTHER; note = 2'-deoxy-2'-fluoro modified nucleotide
  modified_base 13: mod_base = OTHER; note = 2'-O-methyl modified nucleotide
  modified_base 14: mod_base = OTHER; note = 2'-deoxy-2'-fluoro modified nucleotide
  modified_base 15: mod_base = OTHER; note = 2'-O-methyl modified nucleotide
  modified_base 16: mod_base = OTHER; note = 2'-deoxy-2'-fluoro modified nucleotide
  modified_base 17: mod_base = OTHER; note = 2'-O-methyl modified nucleotide
  modified_base 18: mod_base = OTHER; note = 2'-deoxy-2'-fluoro modified nucleotide
  modified_base 19..21: mod_base = OTHER; note = 2'-O-methyl modified nucleotide
  modified_base 20..21: mod_base = OTHER; note = phosphorothioate linkage
  source 1..21: mol_type = other RNA
ttaagataatatatacatgtt

SEQ ID NO: 232 - RNA, 21 nt, synthetic construct
  misc_feature 1..21: note = Synthetic
  modified_base 1..3: mod_base = OTHER; note = 2'-deoxy-2'-fluoro modified nucleotide
  modified_base 5..7: mod_base = OTHER; note = 2'-deoxy-2'-fluoro modified nucleotide
  modified_base 11..12: mod_base = OTHER; note = 2'-deoxy-2'-fluoro modified nucleotide
  modified_base 14..15: mod_base = OTHER; note = 2'-deoxy-2'-fluoro modified nucleotide
  modified_base 18: mod_base = OTHER; note = 2'-deoxy-2'-fluoro modified nucleotide
  modified_base 20..21: mod_base = OTHER; note = 2'-O-methyl modified nucleotide
  modified_base 20..21: mod_base = OTHER; note = phosphorothioate linkage
  source 1..21: mol_type = other RNA
tccatttggattatcaacatt

SEQ ID NO: 233 - RNA, 21 nt, synthetic construct
  misc_feature 1..21: note = Synthetic
  misc_feature 1: note = Nucleotide linked to an inverted abasic cap
  modified_base 2: mod_base = OTHER; note = 2'-O-methyl modified nucleotide
  modified_base 5..6: mod_base = OTHER; note = 2'-O-methyl modified nucleotide
  modified_base 8..9: mod_base = OTHER; note = 2'-O-methyl modified nucleotide
  modified_base 13..15: mod_base = OTHER; note = 2'-O-methyl modified nucleotide
  modified_base 17..21: mod_base = OTHER; note = 2'-O-methyl modified nucleotide
  modified_base 20..21: mod_base = OTHER; note = phosphorothioate linkage
  misc_feature 21: note = Nucleotide linked to an inverted abasic cap
  source 1..21: mol_type = other RNA
tgttgataatccaaatggatt

SEQ ID NO: 234 - RNA, 21 nt, synthetic construct
  misc_feature 1..21: note = Synthetic
  modified_base 4: mod_base = OTHER; note = 2'-deoxy-2'-fluoro modified nucleotide
  modified_base 8..10: mod_base = OTHER; note = 2'-deoxy-2'-fluoro modified nucleotide
  modified_base 13: mod_base = OTHER; note = 2'-deoxy-2'-fluoro modified nucleotide
  modified_base 16..17: mod_base = OTHER; note = 2'-deoxy-2'-fluoro modified nucleotide
  modified_base 19: mod_base = OTHER; note = 2'-deoxy-2'-fluoro modified nucleotide
  modified_base 20..21: mod_base = OTHER; note = 2'-O-methyl modified nucleotide
  modified_base 20..21: mod_base = OTHER; note = phosphorothioate linkage
  source 1..21: mol_type = other RNA
tccatttggattatcaacatt

SEQ ID NO: 235 - RNA, 21 nt, synthetic construct
  misc_feature 1..21: note = Synthetic
  misc_feature 1: note = Nucleotide linked to an inverted abasic cap
  modified_base 1: mod_base = OTHER; note = 2'-deoxy-2'-fluoro modified nucleotide
  modified_base 2: mod_base = OTHER; note = 2'-O-methyl modified nucleotide
  modified_base 3: mod_base = OTHER; note = 2'-deoxy-2'-fluoro modified nucleotide
  modified_base 4: mod_base = OTHER; note = 2'-O-methyl modified nucleotide
  modified_base 5: mod_base = OTHER; note = 2'-deoxy-2'-fluoro modified nucleotide
  modified_base 6: mod_base = OTHER; note = 2'-O-methyl modified nucleotide
  modified_base 7: mod_base = OTHER; note = 2'-deoxy-2'-fluoro modified nucleotide
  modified_base 8: mod_base = OTHER; note = 2'-O-methyl modified nucleotide
  modified_base 9: mod_base = OTHER; note = 2'-deoxy-2'-fluoro modified nucleotide
  modified_base 10: mod_base = OTHER; note = 2'-O-methyl modified nucleotide
  modified_base 11..12: mod_base = OTHER; note = 2'-deoxy-2'-fluoro modified nucleotide
  modified_base 13: mod_base = OTHER; note = 2'-O-methyl modified nucleotide
  modified_base 14..17: mod_base = OTHER; note = 2'-deoxy-2'-fluoro modified nucleotide
  modified_base 18..21: mod_base = OTHER; note = 2'-O-methyl modified nucleotide
  modified_base 20..21: mod_base = OTHER; note = phosphorothioate linkage
  misc_feature 21: note = Nucleotide linked to an inverted abasic cap
  source 1..21: mol_type = other RNA
catgtatatattatcttaatt

SEQ ID NO: 236 - DNA, 21 bp, synthetic construct
  misc_feature 1..21: note = Synthetic
  misc_feature 1..19: note = ribonucleotide unmodified or modified as described for this sequence
  misc_feature 1: note = Nucleotide linked to an inverted abasic cap
  modified_base 4..5: mod_base = OTHER; note = 2'-deoxy-2'-fluoro modified nucleotide
  modified_base 7: mod_base = OTHER; note = 2'-deoxy-2'-fluoro modified nucleotide
  modified_base 10..11: mod_base = OTHER; note = 2'-deoxy-2'-fluoro modified nucleotide
  modified_base 13..15: mod_base = OTHER; note = 2'-deoxy-2'-fluoro modified nucleotide
  modified_base 17..18: mod_base = OTHER; note = 2'-deoxy-2'-fluoro modified nucleotide
  misc_feature 21: note = Nucleotide linked to an inverted abasic cap
  source 1..21: mol_type = other DNA
  misc_feature 1..3: note = DNA
  misc_feature 4..5: note = RNA
  misc_feature 6: note = DNA
  misc_feature 7: note = RNA
  misc_feature 8..9: note = DNA
  misc_feature 10..11: note = RNA
  misc_feature 12: note = DNA
  misc_feature 13..15: note = RNA
  misc_feature 16: note = DNA
  misc_feature 17..18: note = RNA
  misc_feature 19..21: note = DNA
aagccatggttgcttgttatt

SEQ ID NO: 237 - RNA, 21 nt, synthetic construct
  misc_feature 1..21: note = Synthetic
  modified_base 4: mod_base = OTHER; note = 2'-deoxy-2'-fluoro modified nucleotide
  modified_base 5..7: mod_base = OTHER; note = 2'-O-methyl modified nucleotide
  modified_base 8: mod_base = OTHER; note = 2'-deoxy-2'-fluoro modified nucleotide
  modified_base 9..10: mod_base = OTHER; note = 2'-O-methyl modified nucleotide
  modified_base 11..12: mod_base = OTHER; note = 2'-deoxy-2'-fluoro modified nucleotide
  modified_base 13: mod_base = OTHER; note = 2'-O-methyl modified nucleotide
  modified_base 14: mod_base = OTHER; note = 2'-deoxy-2'-fluoro modified nucleotide
  modified_base 15..16: mod_base = OTHER; note = 2'-O-methyl modified nucleotide
  modified_base 17..19: mod_base = OTHER; note = 2'-deoxy-2'-fluoro modified nucleotide
  modified_base 20..21: mod_base = OTHER; note = 2'-O-methyl modified nucleotide
  source 1..21: mol_type = other RNA
taacaagcaaccatggctttt

SEQ ID NO: 238 - RNA, 21 nt, synthetic construct
  misc_feature 1..21: note = Synthetic
  misc_feature 1: note = Nucleotide linked to an inverted abasic cap
  modified_base 1: mod_base = OTHER; note = 2'-O-methyl modified nucleotide
  modified_base 3..4: mod_base = OTHER; note = 2'-O-methyl modified nucleotide
  modified_base 7: mod_base = OTHER; note = 2'-O-methyl modified nucleotide
  modified_base 10..12: mod_base = OTHER; note = 2'-O-methyl modified nucleotide
  modified_base 16: mod_base = OTHER; note = 2'-O-methyl modified nucleotide
  modified_base 20..21: mod_base = OTHER; note = 2'-O-methyl modified nucleotide
  modified_base 20..21: mod_base = OTHER; note = phosphorothioate linkage
  misc_feature 21: note = Nucleotide linked to an inverted abasic cap
  source 1..21: mol_type = other RNA
tgttgataatccaaatggatt

SEQ ID NO: 239 - RNA, 21 nt, synthetic construct
  misc_feature 1..21: note = Synthetic
  modified_base 4: mod_base = OTHER; note = 2'-O-methyl modified nucleotide
  modified_base 5..7: mod_base = OTHER; note = 2'-deoxy-2'-fluoro modified nucleotide
  modified_base 8..10: mod_base = OTHER; note = 2'-O-methyl modified nucleotide
  modified_base 11..12: mod_base = OTHER; note = 2'-deoxy-2'-fluoro modified nucleotide
  modified_base 13: mod_base = OTHER; note = 2'-O-methyl modified nucleotide
  modified_base 14..15: mod_base = OTHER; note = 2'-deoxy-2'-fluoro modified nucleotide
  modified_base 16..17: mod_base = OTHER; note = 2'-O-methyl modified nucleotide
  modified_base 18: mod_base = OTHER; note = 2'-deoxy-2'-fluoro modified nucleotide
  modified_base 19..21: mod_base = OTHER; note = 2'-O-methyl modified nucleotide
  modified_base 20..21: mod_base = OTHER; note = phosphorothioate linkage
  source 1..21: mol_type = other RNA
tccatttggattatcaacatt

SEQ ID NO: 240 - DNA, 21 bp, synthetic construct
  misc_feature 1..21: note = Synthetic
  misc_feature 1: note = Nucleotide linked to an inverted abasic cap
  modified_base 1: mod_base = OTHER; note = 2'-deoxy-2'-fluoro modified nucleotide
  modified_base 3: mod_base = OTHER; note = 2'-deoxy-2'-fluoro modified nucleotide
  modified_base 5: mod_base = OTHER; note = 2'-deoxy-2'-fluoro modified nucleotide
  modified_base 8: mod_base = OTHER; note = 2'-deoxy-2'-fluoro modified nucleotide
  modified_base 10: mod_base = OTHER; note = 2'-deoxy-2'-fluoro modified nucleotide
  modified_base 12: mod_base = OTHER; note = 2'-deoxy-2'-fluoro modified nucleotide
  modified_base 14: mod_base = OTHER; note = 2'-deoxy-2'-fluoro modified nucleotide
  modified_base 16: mod_base = OTHER; note = 2'-deoxy-2'-fluoro modified nucleotide
  modified_base 18..19: mod_base = OTHER; note = 2'-deoxy-2'-fluoro modified nucleotide
  modified_base 20..21: mod_base = OTHER; note = 2'-O-methyl modified nucleotide
  modified_base 20..21: mod_base = OTHER; note = phosphorothioate linkage
  misc_feature 21: note = Nucleotide linked to an inverted abasic cap
  source 1..21: mol_type = other DNA
  misc_feature 1: note = RNA
  misc_feature 2: note = DNA
  misc_feature 3: note = RNA
  misc_feature 4: note = DNA
  misc_feature 5: note = RNA
  misc_feature 6..7: note = DNA
  misc_feature 8: note = RNA
  misc_feature 9: note = DNA
  misc_feature 10: note = RNA
  misc_feature 11: note = DNA
  misc_feature 12: note = RNA
  misc_feature 13: note = DNA
  misc_feature 14: note = RNA
  misc_feature 15: note = DNA
  misc_feature 16: note = RNA
  misc_feature 17: note = DNA
  misc_feature 18..21: note = RNA
tgtgtgacatgtatatatttt

SEQ ID NO: 241 - RNA, 21 nt, synthetic construct
  misc_feature 1..21: note = Synthetic
  modified_base 4: mod_base = OTHER; note = 2'-O-methyl modified nucleotide
  modified_base 5: mod_base = OTHER; note = 2'-deoxy-2'-fluoro modified nucleotide
  modified_base 6: mod_base = OTHER; note = 2'-O-methyl modified nucleotide
  modified_base 7: mod_base = OTHER; note = 2'-deoxy-2'-fluoro modified nucleotide
  modified_base 8: mod_base = OTHER; note = 2'-O-methyl modified nucleotide
  modified_base 9: mod_base = OTHER; note = 2'-deoxy-2'-fluoro modified nucleotide
  modified_base 10: mod_base = OTHER; note = 2'-O-methyl modified nucleotide
  modified_base 11: mod_base = OTHER; note = 2'-deoxy-2'-fluoro modified nucleotide
  modified_base 12: mod_base = OTHER; note = 2'-O-methyl modified nucleotide
  modified_base 13..14: mod_base = OTHER; note = 2'-deoxy-2'-fluoro modified nucleotide
  modified_base 15: mod_base = OTHER; note = 2'-O-methyl modified nucleotide
  modified_base 16: mod_base = OTHER; note = 2'-deoxy-2'-fluoro modified nucleotide
  modified_base 17: mod_base = OTHER; note = 2'-O-methyl modified nucleotide
  modified_base 18: mod_base = OTHER; note = 2'-deoxy-2'-fluoro modified nucleotide
  modified_base 19..21: mod_base = OTHER; note = 2'-O-methyl modified nucleotide
  modified_base 20..21: mod_base = OTHER; note = phosphorothioate linkage
  source 1..21: mol_type = other RNA
aatatatacatgtcacacatt

SEQ ID NO: 242 - DNA, 21 bp, synthetic construct
  misc_feature 1..21: note = Synthetic
  misc_feature 1: note = Nucleotide linked to an inverted abasic cap
  modified_base 1: mod_base = OTHER; note = 2'-deoxy-2'-fluoro modified nucleotide
  modified_base 3: mod_base = OTHER; note = 2'-deoxy-2'-fluoro modified nucleotide
  modified_base 5: mod_base = OTHER; note = 2'-deoxy-2'-fluoro modified nucleotide
  modified_base 7: mod_base = OTHER; note = 2'-deoxy-2'-fluoro modified nucleotide
  modified_base 9: mod_base = OTHER; note = 2'-deoxy-2'-fluoro modified nucleotide
  modified_base 11..12: mod_base = OTHER; note = 2'-deoxy-2'-fluoro modified nucleotide
  modified_base 14..17: mod_base = OTHER; note = 2'-deoxy-2'-fluoro modified nucleotide
  modified_base 20..21: mod_base = OTHER; note = 2'-O-methyl modified nucleotide
  modified_base 20..21: mod_base = OTHER; note = phosphorothioate linkage
  misc_feature 21: note = Nucleotide linked to an inverted abasic cap
  source 1..21: mol_type = other DNA
  misc_feature 1: note = RNA
  misc_feature 2: note = DNA
  misc_feature 3: note = RNA
  misc_feature 4: note = DNA
  misc_feature 5: note = RNA
  misc_feature 6: note = DNA
  misc_feature 7: note = RNA
  misc_feature 8: note = DNA
  misc_feature 9: note = RNA
  misc_feature 10: note = DNA
  misc_feature 11..12: note = RNA
  misc_feature 13: note = DNA
  misc_feature 14..17: note = RNA
  misc_feature 18..19: note = DNA
  misc_feature 20..21: note = RNA
catgtatatattatcttaatt

SEQ ID NO: 243 - RNA, 21 nt, synthetic construct
  misc_feature 1..21: note = Synthetic
  misc_feature 1: note = Nucleotide linked to an inverted abasic cap
  modified_base 20..21: mod_base = OTHER; note = 2'-O-methyl modified nucleotide
  modified_base 20..21: mod_base = OTHER; note = phosphorothioate linkage
  misc_feature 21: note = Nucleotide linked to an inverted abasic cap
  source 1..21: mol_type = other RNA
gatggaagatgtgtgacattt

SEQ ID NO: 244 - RNA, 21 nt, synthetic construct
  misc_feature 1..21: note = Synthetic
  modified_base 20..21: mod_base = OTHER; note = 2'-O-methyl modified nucleotide
  modified_base 20..21: mod_base = OTHER; note = phosphorothioate linkage
  source 1..21: mol_type = other RNA
atgtcacacatcttccatctt

SEQ ID NO: 245 - RNA, 21 nt, synthetic construct
  misc_feature 1..21: note = Synthetic
  misc_feature 1: note = Nucleotide linked to an inverted abasic cap
  modified_base 3: mod_base = OTHER; note = 2'-deoxy-2'-fluoro modified nucleotide
  modified_base 5: mod_base = OTHER; note = 2'-deoxy-2'-fluoro modified nucleotide
  modified_base 7: mod_base = OTHER; note = 2'-deoxy-2'-fluoro modified nucleotide
  modified_base 10: mod_base = OTHER; note = 2'-deoxy-2'-fluoro modified nucleotide
  modified_base 12: mod_base = OTHER; note = 2'-deoxy-2'-fluoro modified nucleotide
  modified_base 14: mod_base = OTHER; note = 2'-deoxy-2'-fluoro modified nucleotide
  modified_base 16: mod_base = OTHER; note = 2'-deoxy-2'-fluoro modified nucleotide
  modified_base 18: mod_base = OTHER; note = 2'-deoxy-2'-fluoro modified nucleotide
  modified_base 20..21: mod_base = OTHER; note = 2'-O-methyl modified nucleotide
  modified_base 20..21: mod_base = OTHER; note = phosphorothioate linkage
  misc_feature 21: note = Nucleotide linked to an inverted abasic cap
  source 1..21: mol_type = other RNA
gatgtgtgacatgtatatatt

SEQ ID NO: 246 - DNA, 21 bp, synthetic construct
  misc_feature 1..21: note = Synthetic
  misc_feature 1..19: note = ribonucleotide unmodified or modified as described for this sequence
  misc_feature 1: note = Nucleotide linked to an inverted abasic cap
  modified_base 1: mod_base = OTHER; note = 2'-deoxy-2'-fluoro modified nucleotide
  modified_base 4: mod_base = OTHER; note = 2'-deoxy-2'-fluoro modified nucleotide
  modified_base 9: mod_base = OTHER; note = 2'-deoxy-2'-fluoro modified nucleotide
  modified_base 13..14: mod_base = OTHER; note = 2'-deoxy-2'-fluoro modified nucleotide
  modified_base 16: mod_base = OTHER; note = 2'-deoxy-2'-fluoro modified nucleotide
  modified_base 18: mod_base = OTHER; note = 2'-deoxy-2'-fluoro modified nucleotide
  misc_feature 21: note = Nucleotide linked to an inverted abasic cap
  source 1..21: mol_type = other DNA
  misc_feature 1: note = RNA
  misc_feature 2..3: note = DNA
  misc_feature 4: note = RNA
  misc_feature 5..8: note = DNA
  misc_feature 9: note = RNA
  misc_feature 10..12: note = DNA
  misc_feature 13..14: note = RNA
  misc_feature 15: note = DNA
  misc_feature 16: note = RNA
  misc_feature 17: note = DNA
  misc_feature 18: note = RNA
  misc_feature 19..21: note = DNA
caatggaacgggttatgtatt

SEQ ID NO: 247 - RNA, 21 nt, synthetic construct
  misc_feature 1..21: note = Synthetic
  modified_base 4: mod_base = OTHER; note = 2'-O-methyl modified nucleotide
  modified_base 5: mod_base = OTHER; note = 2'-deoxy-2'-fluoro modified nucleotide
  modified_base 6..7: mod_base = OTHER; note = 2'-O-methyl modified nucleotide
  modified_base 8..10: mod_base = OTHER; note = 2'-deoxy-2'-fluoro modified nucleotide
  modified_base 11: mod_base = OTHER; note = 2'-O-methyl modified nucleotide
  modified_base 12..15: mod_base = OTHER; note = 2'-deoxy-2'-fluoro modified nucleotide
  modified_base 16: mod_base = OTHER; note = 2'-O-methyl modified nucleotide
  modified_base 17..18: mod_base = OTHER; note = 2'-deoxy-2'-fluoro modified nucleotide
  modified_base 19..21: mod_base = OTHER; note = 2'-O-methyl modified nucleotide
  source 1..21: mol_type = other RNA
tacataacccgttccattgtt

SEQ ID NO: 248 - RNA, 21 nt, synthetic construct
  misc_feature 1..21: note = Synthetic
  modified_base 1: mod_base = OTHER; note = 2'-deoxy-2'-fluoro modified nucleotide
  modified_base 3: mod_base = OTHER; note = 2'-deoxy-2'-fluoro modified nucleotide
  modified_base 5: mod_base = OTHER; note = 2'-deoxy-2'-fluoro modified nucleotide
  modified_base 7..8: mod_base = OTHER; note = 2'-deoxy-2'-fluoro modified nucleotide
  modified_base 10: mod_base = OTHER; note = 2'-deoxy-2'-fluoro modified nucleotide
  modified_base 12: mod_base = OTHER; note = 2'-deoxy-2'-fluoro modified nucleotide
  modified_base 14..19: mod_base = OTHER; note = 2'-deoxy-2'-fluoro modified nucleotide
  modified_base 20..21: mod_base = OTHER; note = 2'-O-methyl modified nucleotide
  modified_base 20..21: mod_base = OTHER; note = phosphorothioate linkage
  source 1..21: mol_type = other RNA
tacatgtcacacatcttcctt

SEQ ID NO: 249 - RNA, 21 nt, synthetic construct
  misc_feature 1..21: note = Synthetic
  misc_feature 1: note = Nucleotide linked to an inverted abasic cap
  modified_base 1: mod_base = OTHER; note = 2'-deoxy-2'-fluoro modified nucleotide
  modified_base 3..4: mod_base = OTHER; note = 2'-deoxy-2'-fluoro modified nucleotide
  modified_base 7: mod_base = OTHER; note = 2'-deoxy-2'-fluoro modified nucleotide
  modified_base 10..12: mod_base = OTHER; note = 2'-deoxy-2'-fluoro modified nucleotide
  modified_base 16: mod_base = OTHER; note = 2'-deoxy-2'-fluoro modified nucleotide
  modified_base 20..21: mod_base = OTHER; note = 2'-O-methyl modified nucleotide
  modified_base 20..21: mod_base = OTHER; note = phosphorothioate linkage
  misc_feature 21: note = Nucleotide linked to an inverted abasic cap
  source 1..21: mol_type = other RNA
tgttgataatccaaatggatt

SEQ ID NO: 250 - DNA, 21 bp, synthetic construct
  misc_feature 1..21: note = Synthetic
  misc_feature 1..19: note = ribonucleotide unmodified or modified as described for this sequence
  misc_feature 1: note = Nucleotide linked to an inverted abasic cap
  modified_base 1..2: mod_base = OTHER; note = 2'-deoxy-2'-fluoro modified nucleotide
  modified_base 5: mod_base = OTHER; note = 2'-deoxy-2'-fluoro modified nucleotide
  modified_base 8..10: mod_base = OTHER; note = 2'-deoxy-2'-fluoro modified nucleotide
  modified_base 14: mod_base = OTHER; note = 2'-deoxy-2'-fluoro modified nucleotide
  modified_base 20..21: mod_base = OTHER; note = phosphorothioate linkage
  misc_feature 21: note = Nucleotide linked to an inverted abasic cap
  source 1..21: mol_type = other DNA
  misc_feature 1..2: note = RNA
  misc_feature 3..4: note = DNA
  misc_feature 5: note = RNA
  misc_feature 6..7: note = DNA
  misc_feature 8..10: note = RNA
  misc_feature 11..13: note = DNA
  misc_feature 14: note = RNA
  misc_feature 15..21: note = DNA
ttgataatccaaatggagatt

SEQ ID NO: 251 - RNA, 21 nt, synthetic construct
  misc_feature 1..21: note = Synthetic
  modified_base 5: mod_base = OTHER; note = 2'-O-methyl modified nucleotide
  modified_base 7: mod_base = OTHER; note = 2'-O-methyl modified nucleotide
  modified_base 9: mod_base = OTHER; note = 2'-O-methyl modified nucleotide
  modified_base 11: mod_base = OTHER; note = 2'-O-methyl modified nucleotide
  modified_base 13: mod_base = OTHER; note = 2'-O-methyl modified nucleotide
  modified_base 16: mod_base = OTHER; note = 2'-O-methyl modified nucleotide
  modified_base 18: mod_base = OTHER; note = 2'-O-methyl modified nucleotide
  modified_base 20..21: mod_base = OTHER; note = 2'-O-methyl modified nucleotide
  modified_base 20..21: mod_base = OTHER; note = phosphorothioate linkage
  source 1..21: mol_type = other RNA
aatatatacatgtcacacatt

SEQ ID NO: 252 - DNA, 21 bp, synthetic construct
  misc_feature 1..21: note = Synthetic
  misc_feature 1: note = Nucleotide linked to an inverted abasic cap
  modified_base 7: mod_base = OTHER; note = 2'-deoxy-2'-fluoro modified nucleotide
  modified_base 9: mod_base = OTHER; note = 2'-deoxy-2'-fluoro modified nucleotide
  modified_base 11: mod_base = OTHER; note = 2'-deoxy-2'-fluoro modified nucleotide
  modified_base 14: mod_base = OTHER; note = 2'-deoxy-2'-fluoro modified nucleotide
  modified_base 16: mod_base = OTHER; note = 2'-deoxy-2'-fluoro modified nucleotide
  modified_base 18: mod_base = OTHER; note = 2'-deoxy-2'-fluoro modified nucleotide
  modified_base 20..21: mod_base = OTHER; note = 2'-O-methyl modified nucleotide
  modified_base 20..21: mod_base = OTHER; note = phosphorothioate linkage
  misc_feature 21: note = Nucleotide linked to an inverted abasic cap
  source 1..21: mol_type = other DNA
  misc_feature 1..6: note = DNA
  misc_feature 7: note = RNA
  misc_feature 8: note = DNA
  misc_feature 9: note = RNA
  misc_feature 10: note = DNA
  misc_feature 11: note = RNA
  misc_feature 12..13: note = DNA
  misc_feature 14: note = RNA
  misc_feature 15: note = DNA
  misc_feature 16: note = RNA
  misc_feature 17: note = DNA
  misc_feature 18: note = RNA
  misc_feature 19: note = DNA
  misc_feature 20..21: note = RNA
ggaagatgtgtgacatgtatt

SEQ ID NO: 253 - DNA, 21 bp, synthetic construct
  misc_feature 1..21: note = Synthetic
  misc_feature 1..19: note = ribonucleotide unmodified or modified as described for this sequence
  misc_feature 1: note = Nucleotide linked to an inverted abasic cap
  modified_base 3: mod_base = OTHER; note = 2'-deoxy-2'-fluoro modified nucleotide
  modified_base 10: mod_base = OTHER; note = 2'-deoxy-2'-fluoro modified nucleotide
  modified_base 12: mod_base = OTHER; note = 2'-deoxy-2'-fluoro modified nucleotide
  modified_base 14: mod_base = OTHER; note = 2'-deoxy-2'-fluoro modified nucleotide
  modified_base 17: mod_base = OTHER; note = 2'-deoxy-2'-fluoro modified nucleotide
  modified_base 19: mod_base = OTHER; note = 2'-deoxy-2'-fluoro modified nucleotide
  modified_base 20..21: mod_base = OTHER; note = phosphorothioate linkage
  misc_feature 21: note = Nucleotide linked to an inverted abasic cap
  source 1..21: mol_type = other DNA
  misc_feature 1..2: note = DNA
  misc_feature 3: note = RNA
  misc_feature 4..9: note = DNA
  misc_feature 10: note = RNA
  misc_feature 11: note = DNA
  misc_feature 12: note = RNA
  misc_feature 13: note = DNA
  misc_feature 14: note = RNA
  misc_feature 15..16: note = DNA
  misc_feature 17: note = RNA
  misc_feature 18: note = DNA
  misc_feature 19: note = RNA
  misc_feature 20..21: note = DNA
gatggaagatgtgtgacattt

SEQ ID NO: 254 - RNA, 21 nt, synthetic construct
  misc_feature 1..21: note = Synthetic
  misc_feature 1: note = Nucleotide linked to an inverted abasic cap
  modified_base 20..21: mod_base = OTHER; note = 2'-O-methyl modified nucleotide
  modified_base 20..21: mod_base = OTHER; note = phosphorothioate linkage
  misc_feature 21: note = Nucleotide linked to an inverted abasic cap
  source 1..21: mol_type = other RNA
gtgtgacatgtatatattatt

SEQ ID NO: 255 - RNA, 21 nt, synthetic construct
  misc_feature 1..21: note = Synthetic
  modified_base 20..21: mod_base = OTHER; note = 2'-O-methyl modified nucleotide
  modified_base 20..21: mod_base = OTHER; note = phosphorothioate linkage
  source 1..21: mol_type = other RNA
taatatatacatgtcacactt

SEQ ID NO: 256 - DNA, 21 bp, synthetic construct
  misc_feature 1..21: note = Synthetic
  misc_feature 1..19: note = ribonucleotide unmodified or modified as described for this sequence
  misc_feature 1: note = Nucleotide linked to an inverted abasic cap
  modified_base 1: mod_base = OTHER; note = 2'-deoxy-2'-fluoro modified nucleotide
  modified_base 3..4: mod_base = OTHER; note = 2'-deoxy-2'-fluoro modified nucleotide
  modified_base 7: mod_base = OTHER; note = 2'-deoxy-2'-fluoro modified nucleotide
  modified_base 10..12: mod_base = OTHER; note = 2'-deoxy-2'-fluoro modified nucleotide
  modified_base 16: mod_base = OTHER; note = 2'-deoxy-2'-fluoro modified nucleotide
  modified_base 20..21: mod_base = OTHER; note = phosphorothioate linkage
  misc_feature 21: note = Nucleotide linked to an inverted abasic cap
  source 1..21: mol_type = other DNA
  misc_feature 1: note = RNA
  misc_feature 2: note = DNA
  misc_feature 3..4: note = RNA
  misc_feature 5..6: note = DNA
  misc_feature 7: note = RNA
  misc_feature 8..9: note = DNA
  misc_feature 10..12: note = RNA
  misc_feature 13..15: note = DNA
  misc_feature 16: note = RNA
  misc_feature 17..21: note = DNA
tgttgataatccaaatggatt

SEQ ID NO: 257 - DNA, 21 bp, synthetic construct
  misc_feature 1..21: note = Synthetic
  misc_feature 1..19: note = ribonucleotide unmodified or modified as described for this sequence
  misc_feature 1: note = Nucleotide linked to an inverted abasic cap
  modified_base 7: mod_base = OTHER; note = 2'-deoxy-2'-fluoro modified nucleotide
  modified_base 9: mod_base = OTHER; note = 2'-deoxy-2'-fluoro modified nucleotide
  modified_base 11: mod_base = OTHER; note = 2'-deoxy-2'-fluoro modified nucleotide
  modified_base 14: mod_base = OTHER; note = 2'-deoxy-2'-fluoro modified nucleotide
  modified_base 16: mod_base = OTHER; note = 2'-deoxy-2'-fluoro modified nucleotide
  modified_base 18: mod_base = OTHER; note = 2'-deoxy-2'-fluoro modified nucleotide
  modified_base 20..21: mod_base = OTHER; note = phosphorothioate linkage
  misc_feature 21: note = Nucleotide linked to an inverted abasic cap
  source 1..21: mol_type = other DNA
  misc_feature 1..6: note = DNA
  misc_feature 7: note = RNA
  misc_feature 8: note = DNA
  misc_feature 9: note = RNA
  misc_feature 10: note = DNA
  misc_feature 11: note = RNA
  misc_feature 12..13: note = DNA
  misc_feature 14: note = RNA
  misc_feature 15: note = DNA
  misc_feature 16: note = RNA
  misc_feature 17: note = DNA
  misc_feature 18: note = RNA
  misc_feature 19..21: note = DNA
ggaagatgtgtgacatgtatt

SEQ ID NO: 258 - DNA, 21 bp, synthetic construct
  misc_feature 1..21: note = Synthetic
  misc_feature 1: note = Nucleotide linked to an inverted abasic cap
  modified_base 3: mod_base = OTHER; note = 2'-deoxy-2'-fluoro modified nucleotide
  modified_base 10: mod_base = OTHER; note = 2'-deoxy-2'-fluoro modified nucleotide
  modified_base 12: mod_base = OTHER; note = 2'-deoxy-2'-fluoro modified nucleotide
  modified_base 14: mod_base = OTHER; note = 2'-deoxy-2'-fluoro modified nucleotide
  modified_base 17: mod_base = OTHER; note = 2'-deoxy-2'-fluoro modified nucleotide
  modified_base 19: mod_base = OTHER; note = 2'-deoxy-2'-fluoro modified nucleotide
  modified_base 20..21: mod_base = OTHER; note = 2'-O-methyl modified nucleotide
  modified_base 20..21: mod_base = OTHER; note = phosphorothioate linkage
  misc_feature 21: note = Nucleotide linked to an inverted abasic cap
  source 1..21: mol_type = other DNA
  misc_feature 1..2: note = DNA
  misc_feature 3: note = RNA
  misc_feature 4..9: note = DNA
  misc_feature 10: note = RNA
  misc_feature 11: note = DNA
  misc_feature 12: note = RNA
  misc_feature 13: note = DNA
  misc_feature 14: note = RNA
  misc_feature 15..16: note = DNA
  misc_feature 17: note = RNA
  misc_feature 18: note = DNA
  misc_feature 19..21: note = RNA
gatggaagatgtgtgacattt

SEQ ID NO: 259 - DNA, 21 bp, synthetic construct
  misc_feature 1..21: note = Synthetic
  misc_feature 1..19: note = ribonucleotide unmodified or modified as described for this sequence
  misc_feature 1: note = Nucleotide linked to an inverted abasic cap
  modified_base 1: mod_base = OTHER; note = 2'-deoxy-2'-fluoro modified nucleotide
  modified_base 3: mod_base = OTHER; note = 2'-deoxy-2'-fluoro modified nucleotide
  modified_base 5: mod_base = OTHER; note = 2'-deoxy-2'-fluoro modified nucleotide
  modified_base 8: mod_base = OTHER; note = 2'-deoxy-2'-fluoro modified nucleotide
  modified_base 10: mod_base = OTHER; note = 2'-deoxy-2'-fluoro modified nucleotide
  modified_base 12: mod_base = OTHER; note = 2'-deoxy-2'-fluoro modified nucleotide
  modified_base 14: mod_base = OTHER; note = 2'-deoxy-2'-fluoro modified nucleotide
  modified_base 16: mod_base = OTHER; note = 2'-deoxy-2'-fluoro modified nucleotide
  modified_base 18..19: mod_base = OTHER; note = 2'-deoxy-2'-fluoro modified nucleotide
  modified_base 20..21: mod_base = OTHER; note = phosphorothioate linkage
  misc_feature 21: note = Nucleotide linked to an inverted abasic cap
  source 1..21: mol_type = other DNA
  misc_feature 1: note = RNA
  misc_feature 2: note = DNA
  misc_feature 3: note = RNA
  misc_feature 4: note = DNA
  misc_feature 5: note = RNA
  misc_feature 6..7: note = DNA
  misc_feature 8: note = RNA
  misc_feature 9: note = DNA
  misc_feature 10: note = RNA
  misc_feature 11: note = DNA
  misc_feature 12: note = RNA
  misc_feature 13: note = DNA
  misc_feature 14: note = RNA
  misc_feature 15: note = DNA
  misc_feature 16: note = RNA
  misc_feature 17: note = DNA
  misc_feature 18..19: note = RNA
  misc_feature 20..21: note = DNA
tgtgtgacatgtatatatttt

SEQ ID NO: 260 - RNA, 21 nt, synthetic construct
  misc_feature 1..21: note = Synthetic
  misc_feature 1: note = Nucleotide linked to an inverted abasic cap
  modified_base 1..6: mod_base = OTHER; note = 2'-O-methyl modified nucleotide
  modified_base 7: mod_base = OTHER; note = 2'-deoxy-2'-fluoro modified nucleotide
  modified_base 8: mod_base = OTHER; note = 2'-O-methyl modified nucleotide
  modified_base 9: mod_base = OTHER; note = 2'-deoxy-2'-fluoro modified nucleotide
  modified_base 10: mod_base = OTHER; note = 2'-O-methyl modified nucleotide
  modified_base 11: mod_base = OTHER; note = 2'-deoxy-2'-fluoro modified nucleotide
  modified_base 12..13: mod_base = OTHER; note = 2'-O-methyl modified nucleotide
  modified_base 14: mod_base = OTHER; note = 2'-deoxy-2'-fluoro modified nucleotide
  modified_base 15: mod_base = OTHER; note = 2'-O-methyl modified nucleotide
  modified_base 16: mod_base = OTHER; note = 2'-deoxy-2'-fluoro modified nucleotide
  modified_base 17: mod_base = OTHER; note = 2'-O-methyl modified nucleotide
  modified_base 18: mod_base = OTHER; note = 2'-deoxy-2'-fluoro modified nucleotide
  modified_base 19..21: mod_base = OTHER; note = 2'-O-methyl modified nucleotide
  modified_base 20..21: mod_base = OTHER; note = phosphorothioate linkage
  misc_feature 21: note = Nucleotide linked to an inverted abasic cap
  source 1..21: mol_type = other RNA
ggaagatgtgtgacatgtatt

SEQ ID NO: 261 - RNA, 21 nt, synthetic construct
  misc_feature 1..21: note = Synthetic
  misc_feature 1: note = Nucleotide linked to an inverted abasic cap
  modified_base 20..21: mod_base = OTHER; note = 2'-O-methyl modified nucleotide
  modified_base 20..21: mod_base = OTHER; note = phosphorothioate linkage
  misc_feature 21: note = Nucleotide linked to an inverted abasic cap
  source 1..21: mol_type = other RNA
tgtgtgacatgtatatatttt

SEQ ID NO: 262 - RNA, 21 nt, synthetic construct
  misc_feature 1..21: note = Synthetic
  modified_base 20..21: mod_base = OTHER; note = 2'-O-methyl modified nucleotide
  modified_base 20..21: mod_base = OTHER; note = phosphorothioate linkage
  source 1..21: mol_type = other RNA
aatatatacatgtcacacatt

SEQ ID NO: 263 - RNA, 21 nt, synthetic construct
  misc_feature 1..21: note = Synthetic
  modified_base 4: mod_base = OTHER; note = 2'-O-methyl modified nucleotide
  modified_base 6: mod_base = OTHER; note = 2'-O-methyl modified nucleotide
  modified_base 9: mod_base = OTHER; note = 2'-O-methyl modified nucleotide
  modified_base 11: mod_base = OTHER; note = 2'-O-methyl modified nucleotide
  modified_base 13: mod_base = OTHER; note = 2'-O-methyl modified nucleotide
  modified_base 20..21: mod_base = OTHER; note = 2'-O-methyl modified nucleotide
  modified_base 20..21: mod_base = OTHER; note = phosphorothioate linkage
  source 1..21: mol_type = other RNA
tacatgtcacacatcttcctt

SEQ ID NO: 264 - RNA, 21 nt, synthetic construct
  misc_feature 1..21: note = Synthetic
  modified_base 2: mod_base = OTHER; note = 2'-deoxy-2'-fluoro modified nucleotide
  modified_base 4..5: mod_base = OTHER; note = 2'-deoxy-2'-fluoro modified nucleotide
  modified_base 7: mod_base = OTHER; note = 2'-deoxy-2'-fluoro modified nucleotide
  modified_base 9: mod_base = OTHER; note = 2'-deoxy-2'-fluoro modified nucleotide
  modified_base 11..16: mod_base = OTHER; note = 2'-deoxy-2'-fluoro modified nucleotide
  modified_base 18..19: mod_base = OTHER; note = 2'-deoxy-2'-fluoro modified nucleotide
  modified_base 20..21: mod_base = OTHER; note = 2'-O-methyl modified nucleotide
  modified_base 20..21: mod_base = OTHER; note = phosphorothioate linkage
  source 1..21: mol_type = other RNA
atgtcacacatcttccatctt

SEQ ID NO: 265 - RNA, 21 nt, synthetic construct
  misc_feature 1..21: note = Synthetic
  misc_feature 1: note = Nucleotide linked to an inverted abasic cap
  modified_base 2: mod_base = OTHER; note = 2'-O-methyl modified nucleotide
  modified_base 4: mod_base = OTHER; note = 2'-O-methyl modified nucleotide
  modified_base 7: mod_base = OTHER; note = 2'-O-methyl modified nucleotide
  modified_base 9: mod_base = OTHER; note = 2'-O-methyl modified nucleotide
  modified_base 11: mod_base = OTHER; note = 2'-O-methyl modified nucleotide
  modified_base 13: mod_base = OTHER; note = 2'-O-methyl modified nucleotide
  modified_base 15: mod_base = OTHER; note = 2'-O-methyl modified nucleotide
  modified_base 17..18: mod_base = OTHER; note = 2'-O-methyl modified nucleotide
  modified_base 20..21: mod_base = OTHER; note = 2'-O-methyl modified nucleotide
  modified_base 20..21: mod_base = OTHER; note = phosphorothioate linkage
  misc_feature 21: note = Nucleotide linked to an inverted abasic cap
  source 1..21: mol_type = other RNA
gtgtgacatgtatatattatt

SEQ ID NO: 266 - RNA, 21 nt, synthetic construct
  misc_feature 1..21: note = Synthetic
  modified_base 4: mod_base = OTHER; note = 2'-O-methyl modified nucleotide
  modified_base 6: mod_base = OTHER; note = 2'-O-methyl modified nucleotide
  modified_base 8: mod_base = OTHER; note = 2'-O-methyl modified nucleotide
  modified_base 10: mod_base = OTHER; note = 2'-O-methyl modified nucleotide
  modified_base 12: mod_base = OTHER; note = 2'-O-methyl modified nucleotide
  modified_base 15: mod_base = OTHER; note = 2'-O-methyl modified nucleotide
  modified_base 17: mod_base = OTHER; note = 2'-O-methyl modified nucleotide
  modified_base 19..21: mod_base = OTHER; note = 2'-O-methyl modified nucleotide
  modified_base 20..21: mod_base = OTHER; note = phosphorothioate linkage
  source 1..21: mol_type = other RNA
taatatatacatgtcacactt

SEQ ID NO: 267 - RNA, 21 nt, synthetic construct
  misc_feature 1..21: note = Synthetic
  misc_feature 1: note = Nucleotide linked to an inverted abasic cap
  modified_base 1..2: mod_base = OTHER; note = 2'-O-methyl modified nucleotide
  modified_base 3: mod_base = OTHER; note = 2'-deoxy-2'-fluoro modified nucleotide
  modified_base 4..9: mod_base = OTHER; note = 2'-O-methyl modified nucleotide
  modified_base 10: mod_base = OTHER; note = 2'-deoxy-2'-fluoro modified nucleotide
  modified_base 11: mod_base = OTHER; note = 2'-O-methyl modified nucleotide
  modified_base 12: mod_base = OTHER; note = 2'-deoxy-2'-fluoro modified nucleotide
  modified_base 13: mod_base = OTHER; note = 2'-O-methyl modified nucleotide
  modified_base 14: mod_base = OTHER; note = 2'-deoxy-2'-fluoro modified nucleotide
  modified_base 15..16: mod_base = OTHER; note = 2'-O-methyl modified nucleotide
  modified_base 17: mod_base = OTHER; note = 2'-deoxy-2'-fluoro modified nucleotide
  modified_base 18: mod_base = OTHER; note = 2'-O-methyl modified nucleotide
  modified_base 19: mod_base = OTHER; note = 2'-deoxy-2'-fluoro modified nucleotide
  modified_base 20..21: mod_base = OTHER; note = 2'-O-methyl modified nucleotide
  modified_base 20..21: mod_base = OTHER; note = phosphorothioate linkage
  misc_feature 21: note = Nucleotide linked to an inverted abasic cap
  source 1..21: mol_type = other RNA
gatggaagatgtgtgacattt

SEQ ID NO: 268 - DNA, 21 bp, synthetic construct
  misc_feature 1..21: note = Synthetic
  misc_feature 1..19: note = ribonucleotide unmodified or modified as described for this sequence
  misc_feature 1: note = Nucleotide linked to an inverted abasic cap
  modified_base 3: mod_base = OTHER; note = 2'-deoxy-2'-fluoro modified nucleotide
  modified_base 5..10: mod_base = OTHER; note = 2'-deoxy-2'-fluoro modified nucleotide
  modified_base 15..19: mod_base = OTHER; note = 2'-deoxy-2'-fluoro modified nucleotide
  misc_feature 21: note = Nucleotide linked to an inverted abasic cap
  source 1..21: mol_type = other DNA
  misc_feature 1..2: note = DNA
  misc_feature 3: note = RNA
  misc_feature 4: note = DNA
  misc_feature 5..10: note = RNA
  misc_feature 11..14: note = DNA
  misc_feature 15..19: note = RNA
  misc_feature 20..21: note = DNA
gacgtcttctagagccttttt

SEQ ID NO: 269 - RNA, 21 nt, synthetic construct
  misc_feature 1..21: note = Synthetic
  modified_base 4..5: mod_base = OTHER; note = 2'-O-methyl modified nucleotide
  modified_base 6..9: mod_base = OTHER; note = 2'-deoxy-2'-fluoro modified nucleotide
  modified_base 10..13: mod_base = OTHER; note = 2'-O-methyl modified nucleotide
  modified_base 15: mod_base = OTHER; note = 2'-O-methyl modified nucleotide
  modified_base 16: mod_base = OTHER; note = 2'-deoxy-2'-fluoro modified nucleotide
  modified_base 17: mod_base = OTHER; note = 2'-O-methyl modified nucleotide
  modified_base 18..19: mod_base = OTHER; note = 2'-deoxy-2'-fluoro modified nucleotide
  modified_base 20..21: mod_base = OTHER; note = 2'-O-methyl modified nucleotide
  source 1..21: mol_type = other RNA
aaaggctctagaagacgtctt

SEQ ID NO: 270 - RNA, 21 nt, synthetic construct
  misc_feature 1..21: note = Synthetic
  modified_base 4: mod_base = OTHER; note = 2'-deoxy-2'-fluoro modified nucleotide
  modified_base 6: mod_base = OTHER; note = 2'-deoxy-2'-fluoro modified nucleotide
  modified_base 8: mod_base = OTHER; note = 2'-deoxy-2'-fluoro modified nucleotide
  modified_base 10: mod_base = OTHER; note = 2'-deoxy-2'-fluoro modified nucleotide
  modified_base 13: mod_base = OTHER; note = 2'-deoxy-2'-fluoro modified nucleotide
  modified_base 15: mod_base = OTHER; note = 2'-deoxy-2'-fluoro modified nucleotide
  modified_base 17: mod_base = OTHER; note = 2'-deoxy-2'-fluoro modified nucleotide
  modified_base 20..21: mod_base = OTHER; note = 2'-O-methyl modified nucleotide
  modified_base 20..21: mod_base = OTHER; note = phosphorothioate linkage
  source 1..21: mol_type = other RNA
tatatacatgtcacacatctt

SEQ ID NO: 271 - RNA, 21 nt, synthetic construct
  misc_feature 1..21: note = Synthetic
  misc_feature 1: note = Nucleotide linked to an inverted abasic cap
  modified_base 3: mod_base = OTHER; note = 2'-deoxy-2'-fluoro modified nucleotide
  modified_base 10: mod_base = OTHER; note = 2'-deoxy-2'-fluoro modified nucleotide
  modified_base 12: mod_base = OTHER; note = 2'-deoxy-2'-fluoro modified nucleotide
  modified_base 14: mod_base = OTHER; note = 2'-deoxy-2'-fluoro modified nucleotide
  modified_base 17: mod_base = OTHER; note = 2'-deoxy-2'-fluoro modified nucleotide
  modified_base 19: mod_base = OTHER; note = 2'-deoxy-2'-fluoro modified nucleotide
  modified_base 20..21: mod_base = OTHER; note = 2'-O-methyl modified nucleotide
  modified_base 20..21: mod_base = OTHER; note = phosphorothioate linkage
  misc_feature 21: note = Nucleotide linked to an inverted abasic cap
  source 1..21: mol_type = other RNA
gatggaagatgtgtgacattt

SEQ ID NO: 272 - DNA, 21 bp, synthetic construct
  misc_feature 1..21: note = Synthetic
  misc_feature 1..19: note = ribonucleotide unmodified or modified as described for this sequence
  misc_feature 1: note = Nucleotide linked to an inverted abasic cap
  modified_base 3: mod_base = OTHER; note = 2'-deoxy-2'-fluoro modified nucleotide
  modified_base 5: mod_base = OTHER; note = 2'-deoxy-2'-fluoro modified nucleotide
  modified_base 7: mod_base = OTHER; note = 2'-deoxy-2'-fluoro modified nucleotide
  modified_base 9: mod_base = OTHER; note = 2'-deoxy-2'-fluoro modified nucleotide
  modified_base 11: mod_base = OTHER; note = 2'-deoxy-2'-fluoro modified nucleotide
  modified_base 13..14: mod_base = OTHER; note = 2'-deoxy-2'-fluoro modified nucleotide
  modified_base 16..19: mod_base = OTHER; note = 2'-deoxy-2'-fluoro modified nucleotide
  misc_feature 21: note = Nucleotide linked to an inverted abasic cap
  source 1..21: mol_type = other DNA
  misc_feature 1..2: note = DNA
  misc_feature 3: note = RNA
  misc_feature 4: note = DNA
  misc_feature 5: note = RNA
  misc_feature 6: note = DNA
  misc_feature 7: note = RNA
  misc_feature 8: note = DNA
  misc_feature 9: note = RNA
  misc_feature 10: note = DNA
  misc_feature 11: note = RNA
  misc_feature 12: note = DNA
  misc_feature 13..14: note = RNA
  misc_feature 15: note = DNA
  misc_feature 16..19: note = RNA
  misc_feature 20..21: note = DNA
gacatgtatatattatctttt

SEQ ID NO: 273 - RNA, 21 nt, synthetic construct
  misc_feature 1..21: note = Synthetic
  modified_base 4: mod_base = OTHER; note = 2'-O-methyl modified nucleotide
  modified_base 5: mod_base = OTHER; note = 2'-deoxy-2'-fluoro modified nucleotide
  modified_base 6..7: mod_base = OTHER; note = 2'-O-methyl modified nucleotide
  modified_base 8: mod_base = OTHER; note = 2'-deoxy-2'-fluoro modified nucleotide
  modified_base 9: mod_base = OTHER; note = 2'-O-methyl modified nucleotide
  modified_base 10: mod_base = OTHER; note = 2'-deoxy-2'-fluoro modified nucleotide
  modified_base 11: mod_base = OTHER; note = 2'-O-methyl modified nucleotide
  modified_base 12: mod_base = OTHER; note = 2'-deoxy-2'-fluoro modified nucleotide
  modified_base 13: mod_base = OTHER; note = 2'-O-methyl modified nucleotide
  modified_base 14: mod_base = OTHER; note = 2'-deoxy-2'-fluoro modified nucleotide
  modified_base 15: mod_base = OTHER; note = 2'-O-methyl modified nucleotide
  modified_base 16: mod_base = OTHER; note = 2'-deoxy-2'-fluoro modified nucleotide
  modified_base 17: mod_base = OTHER; note = 2'-O-methyl modified nucleotide
  modified_base 18..19: mod_base = OTHER; note = 2'-deoxy-2'-fluoro modified nucleotide
  modified_base 20..21: mod_base = OTHER; note = 2'-O-methyl modified nucleotide
  source 1..21: mol_type = other RNA
aagataatatatacatgtctt

SEQ ID NO: 274 - RNA, 21 nt, synthetic construct
  misc_feature 1..21: note = Synthetic
  misc_feature 1: note = Nucleotide linked to an inverted abasic cap
  modified_base 2..3: mod_base = OTHER; note = 2'-O-methyl modified nucleotide
  modified_base 5: mod_base = OTHER; note = 2'-O-methyl modified nucleotide
  modified_base 8..12: mod_base = OTHER; note = 2'-O-methyl modified nucleotide
  modified_base 14: mod_base = OTHER; note = 2'-O-methyl modified nucleotide
  modified_base 19..21: mod_base = OTHER; note = 2'-O-methyl modified nucleotide
  modified_base 20..21: mod_base = OTHER; note = phosphorothioate linkage
  misc_feature 21: note = Nucleotide linked to an inverted abasic cap
  source 1..21: mol_type = other RNA
gtcgcaaccctcatgaagttt

SEQ ID NO: 275 - RNA, 21 nt, synthetic construct
  misc_feature 1..21: note = Synthetic
  modified_base 4..5: mod_base = OTHER; note = 2'-deoxy-2'-fluoro modified nucleotide
  modified_base 6: mod_base = OTHER; note = 2'-O-methyl modified nucleotide
  modified_base 7: mod_base = OTHER; note = 2'-deoxy-2'-fluoro modified nucleotide
  modified_base 8..12: mod_base = OTHER; note = 2'-O-methyl modified nucleotide
  modified_base 13..14: mod_base = OTHER; note = 2'-deoxy-2'-fluoro modified nucleotide
  modified_base 15: mod_base = OTHER; note = 2'-O-methyl modified nucleotide
  modified_base 16: mod_base = OTHER; note = 2'-deoxy-2'-fluoro modified nucleotide
  modified_base 17..18: mod_base = OTHER; note = 2'-O-methyl modified nucleotide
  modified_base 19: mod_base = OTHER; note = 2'-deoxy-2'-fluoro modified nucleotide
  modified_base 20..21: mod_base = OTHER; note = 2'-O-methyl modified nucleotide
  source 1..21: mol_type = other RNA
acttcatgagggttgcgactt

SEQ ID NO: 276 - DNA, 21 bp, synthetic construct
  misc_feature 1..21: note = Synthetic
  misc_feature 1..19: note = ribonucleotide unmodified or modified as described for this sequence
  misc_feature 1: note = Nucleotide linked to an inverted abasic cap
  modified_base 1: mod_base = OTHER; note = 2'-deoxy-2'-fluoro modified nucleotide
  modified_base 3: mod_base = OTHER; note = 2'-deoxy-2'-fluoro modified nucleotide
  modified_base 5..6: mod_base = OTHER; note = 2'-deoxy-2'-fluoro modified nucleotide
  modified_base 8: mod_base = OTHER; note = 2'-deoxy-2'-fluoro modified nucleotide
  modified_base 10..11: mod_base = OTHER; note = 2'-deoxy-2'-fluoro modified nucleotide
  modified_base 14: mod_base = OTHER; note = 2'-deoxy-2'-fluoro modified nucleotide
  modified_base 17..19: mod_base = OTHER; note = 2'-deoxy-2'-fluoro modified nucleotide
  misc_feature 21: note = Nucleotide linked to an inverted abasic cap
  source 1..21: mol_type = other DNA
  misc_feature 1: note = RNA
  misc_feature 2: note = DNA
  misc_feature 3: note = RNA
  misc_feature 4: note = DNA
  misc_feature 5..6: note = RNA
  misc_feature 7: note = DNA
  misc_feature 8: note = RNA
  misc_feature 9: note = DNA
  misc_feature 10..11: note = RNA
  misc_feature 12..13: note = DNA
  misc_feature 14: note = RNA
  misc_feature 15..16: note = DNA
  misc_feature 17..19: note = RNA
  misc_feature 20..21: note = DNA
tacgtcatgttgataatcctt

SEQ ID NO: 277 - RNA, 21 nt, synthetic construct
  misc_feature 1..21: note = Synthetic
  modified_base 4..5: mod_base = OTHER; note = 2'-deoxy-2'-fluoro modified nucleotide
  modified_base 6: mod_base = OTHER; note = 2'-O-methyl modified nucleotide
  modified_base 7..8: mod_base = OTHER; note = 2'-deoxy-2'-fluoro modified nucleotide
  modified_base 9..10: mod_base = OTHER; note = 2'-O-methyl modified nucleotide
  modified_base 11: mod_base = OTHER; note = 2'-deoxy-2'-fluoro modified nucleotide
  modified_base 12: mod_base = OTHER; note = 2'-O-methyl modified nucleotide
  modified_base 13: mod_base = OTHER; note = 2'-deoxy-2'-fluoro modified nucleotide
  modified_base 15: mod_base = OTHER; note = 2'-O-methyl modified nucleotide
  modified_base 16: mod_base = OTHER; note = 2'-deoxy-2'-fluoro modified nucleotide
  modified_base 17: mod_base = OTHER; note = 2'-O-methyl modified nucleotide
  modified_base 18: mod_base = OTHER; note = 2'-deoxy-2'-fluoro modified nucleotide
  modified_base 19..21: mod_base = OTHER; note = 2'-O-methyl modified nucleotide
  source 1..21: mol_type = other RNA
ggattatcaacatgacgtatt

SEQ ID NO: 278 - DNA, 21 bp, synthetic construct
  misc_feature 1..21: note = Synthetic
  misc_feature 1..19: note = ribonucleotide unmodified or modified as described for this sequence
  misc_feature 1: note = Nucleotide linked to an inverted abasic cap
  modified_base 4..5: mod_base = OTHER; note = 2'-deoxy-2'-fluoro modified nucleotide
  modified_base 7: mod_base = OTHER; note = 2'-deoxy-2'-fluoro modified nucleotide
  modified_base 9: mod_base = OTHER; note = 2'-deoxy-2'-fluoro modified nucleotide
  modified_base 11: mod_base = OTHER; note = 2'-deoxy-2'-fluoro modified nucleotide
  modified_base 13..14: mod_base = OTHER; note = 2'-deoxy-2'-fluoro modified nucleotide
  modified_base 16: mod_base = OTHER; note = 2'-deoxy-2'-fluoro modified nucleotide
  modified_base 18..19: mod_base = OTHER; note = 2'-deoxy-2'-fluoro modified nucleotide
  misc_feature 21: note = Nucleotide linked to an inverted abasic cap
  source 1..21: mol_type = other DNA
  misc_feature 1..3: note = DNA
  misc_feature 4..5: note = RNA
  misc_feature 6: note = DNA
  misc_feature 7: note = RNA
  misc_feature 8: note = DNA
  misc_feature 9: note = RNA
  misc_feature 10: note = DNA
  misc_feature 11: note = RNA
  misc_feature 12: note = DNA
  misc_feature 13..14: note = RNA
  misc_feature 15: note = DNA
  misc_feature 16: note = RNA
  misc_feature 17: note = DNA
  misc_feature 18..19: note = RNA
  misc_feature 20..21: note = DNA
gggttatgtacgtcatgtttt

SEQ ID NO: 279 - RNA, 21 nt, synthetic construct
  misc_feature 1..21: note = Synthetic
  modified_base 4: mod_base = OTHER; note = 2'-O-methyl modified nucleotide
  modified_base 5: mod_base = OTHER; note = 2'-deoxy-2'-fluoro modified nucleotide
  modified_base 6..7: mod_base = OTHER; note = 2'-O-methyl modified nucleotide
  modified_base 8: mod_base = OTHER; note = 2'-deoxy-2'-fluoro modified nucleotide
  modified_base 9: mod_base = OTHER; note = 2'-O-methyl modified nucleotide
  modified_base 10: mod_base = OTHER; note = 2'-deoxy-2'-fluoro modified nucleotide
  modified_base 11: mod_base = OTHER; note = 2'-O-methyl modified nucleotide
  modified_base 12: mod_base = OTHER; note = 2'-deoxy-2'-fluoro modified nucleotide
  modified_base 13: mod_base = OTHER; note = 2'-O-methyl modified nucleotide
  modified_base 14: mod_base = OTHER; note = 2'-deoxy-2'-fluoro modified nucleotide
  modified_base 15..16: mod_base = OTHER; note = 2'-O-methyl modified nucleotide
  modified_base 17..19: mod_base = OTHER; note = 2'-deoxy-2'-fluoro modified nucleotide
  modified_base 20..21: mod_base = OTHER; note = 2'-O-methyl modified nucleotide
  source 1..21: mol_type = other RNA
aacatgacgtacataaccctt

SEQ ID NO: 280 - RNA, 21 nt, synthetic construct
  misc_feature 1..21: note = Synthetic
  misc_feature 1: note = Nucleotide linked to an inverted abasic cap
  modified_base 1..2: mod_base = OTHER; note = 2'-deoxy-2'-fluoro modified nucleotide
  modified_base 5: mod_base = OTHER; note = 2'-deoxy-2'-fluoro modified nucleotide
  modified_base 8..10: mod_base = OTHER; note = 2'-deoxy-2'-fluoro modified nucleotide
  modified_base 14: mod_base = OTHER; note = 2'-deoxy-2'-fluoro modified nucleotide
  modified_base 20..21: mod_base = OTHER; note = 2'-O-methyl modified nucleotide
  modified_base 20..21: mod_base = OTHER; note = phosphorothioate linkage
  misc_feature 21: note = Nucleotide linked to an inverted abasic cap
  source 1..21: mol_type = other RNA
ttgataatccaaatggagatt

SEQ ID NO: 281 - RNA, 21 nt, synthetic construct
  misc_feature 1..21: note = Synthetic
  modified_base 4: mod_base = OTHER; note = 2'-deoxy-2'-fluoro modified nucleotide
  modified_base 5: mod_base = OTHER; note = 2'-O-methyl modified nucleotide
  modified_base 6: mod_base = OTHER; note = 2'-deoxy-2'-fluoro modified nucleotide
  modified_base 7: mod_base = OTHER; note = 2'-O-methyl modified nucleotide
  modified_base 8: mod_base = OTHER; note = 2'-deoxy-2'-fluoro modified nucleotide
  modified_base 9: mod_base = OTHER; note = 2'-O-methyl modified nucleotide
  modified_base 10: mod_base = OTHER; note = 2'-deoxy-2'-fluoro modified nucleotide
  modified_base 11: mod_base = OTHER; note = 2'-O-methyl modified nucleotide
  modified_base 12: mod_base = OTHER; note = 2'-deoxy-2'-fluoro modified nucleotide
  modified_base 13: mod_base = OTHER; note = 2'-O-methyl modified nucleotide
  modified_base 14..15: mod_base = OTHER; note = 2'-deoxy-2'-fluoro modified nucleotide
  modified_base 16: mod_base = OTHER; note = 2'-O-methyl modified nucleotide
  modified_base 17: mod_base = OTHER; note = 2'-deoxy-2'-fluoro modified nucleotide
  modified_base 18: mod_base = OTHER; note = 2'-O-methyl modified nucleotide
  modified_base 19: mod_base = OTHER; note = 2'-deoxy-2'-fluoro modified nucleotide
  modified_base 20..21: mod_base = OTHER; note = 2'-O-methyl modified nucleotide
  modified_base 20..21: mod_base = OTHER; note = phosphorothioate linkage
  source 1..21: mol_type = other RNA
taatatatacatgtcacactt

SEQ ID NO: 282 - RNA, 21 nt, synthetic construct
  misc_feature 1..21: note = Synthetic
  misc_feature 1: note = Nucleotide linked to an inverted abasic cap
  modified_base 3: mod_base = OTHER; note = 2'-O-methyl modified nucleotide
  modified_base 5..10: mod_base = OTHER; note = 2'-O-methyl modified nucleotide
  modified_base 15..21: mod_base = OTHER; note = 2'-O-methyl modified nucleotide
  modified_base 20..21: mod_base = OTHER; note = phosphorothioate linkage
  misc_feature 21: note = Nucleotide linked to an inverted abasic cap
  source 1..21: mol_type = other RNA
gacgtcttctagagccttttt

SEQ ID NO: 283 - RNA, 21 nt, synthetic construct
  misc_feature 1..21: note = Synthetic
  modified_base 9: mod_base = OTHER; note = 2'-O-methyl modified nucleotide
  modified_base 20..21: mod_base = OTHER; note = 2'-O-methyl modified nucleotide
  source 1..21: mol_type = other RNA
aaaggctctagaagacgtctt

SEQ ID NO: 284 - DNA, 21 bp, synthetic construct
  misc_feature 1..21: note = Synthetic
  misc_feature 1: note = Nucleotide linked to an inverted abasic cap
  modified_base 2..3: mod_base = OTHER; note = 2'-deoxy-2'-fluoro modified nucleotide
  modified_base 5: mod_base = OTHER; note = 2'-deoxy-2'-fluoro modified nucleotide
  modified_base 8..12: mod_base = OTHER; note = 2'-deoxy-2'-fluoro modified nucleotide
  modified_base 14: mod_base = OTHER; note = 2'-deoxy-2'-fluoro modified nucleotide
  modified_base 17..21: mod_base = OTHER; note = 2'-O-methyl modified nucleotide
  modified_base 20..21: mod_base = OTHER; note = phosphorothioate linkage
  misc_feature 21: note = Nucleotide linked to an inverted abasic cap
  source 1..21: mol_type = other DNA
  misc_feature 1: note = DNA
  misc_feature 2..3: note = RNA
  misc_feature 4: note = DNA
  misc_feature 5: note = RNA
  misc_feature 6..7: note = DNA
  misc_feature 8..12: note = RNA
  misc_feature 13: note = DNA
  misc_feature 14: note = RNA
  misc_feature 15..16: note = DNA
  misc_feature 17..21: note = RNA
gtcgcaaccctcatgaagttt

SEQ ID NO: 285 - RNA, 21 nt, synthetic construct
  misc_feature 1..21: note = Synthetic
  modified_base 4..5: mod_base = OTHER; note = 2'-O-methyl modified nucleotide
  modified_base 7: mod_base = OTHER; note = 2'-O-methyl modified nucleotide
  modified_base 13: mod_base = OTHER; note = 2'-O-methyl modified nucleotide
  modified_base 16: mod_base = OTHER; note = 2'-O-methyl modified nucleotide
  modified_base 19..21: mod_base = OTHER; note = 2'-O-methyl modified nucleotide
  modified_base 1..2: mod_base = OTHER; note = phosphorothioate linkage
  modified_base 20..21: mod_base = OTHER; note = phosphorothioate linkage
  source 1..21: mol_type = other RNA
acttcatgagggttgcgactt

SEQ ID NO: 286 - RNA, 21 nt, synthetic construct
  misc_feature 1..21: note = Synthetic
  misc_feature 1: note = Nucleotide linked to an inverted abasic cap
  modified_base 20..21: mod_base = OTHER; note = 2'-O-methyl modified nucleotide
  modified_base 20..21: mod_base = OTHER; note = phosphorothioate linkage
  misc_feature 21: note = Nucleotide linked to an inverted abasic cap
  source 1..21: mol_type = other RNA
ggaagatgtgtgacatgtatt

SEQ ID NO: 287 - RNA, 21 nt, synthetic construct
  misc_feature 1..21: note = Synthetic
  modified_base 20..21: mod_base = OTHER; note = 2'-O-methyl modified nucleotide
  modified_base 20..21: mod_base = OTHER; note = phosphorothioate linkage
  source 1..21: mol_type = other RNA
tacatgtcacacatcttcctt

SEQ ID NO: 288 - RNA, 21 nt, synthetic construct
  misc_feature 1..21: note = Synthetic
  modified_base 9: mod_base = OTHER; note = 2'-O-methyl modified nucleotide
  modified_base 20..21: mod_base = OTHER; note = 2'-O-methyl modified nucleotide
  modified_base 1..2: mod_base = OTHER; note = phosphorothioate linkage
  modified_base 2..3: mod_base = OTHER; note = phosphorothioate linkage
  modified_base 3..4: mod_base = OTHER; note = phosphorothioate linkage
  source 1..21: mol_type = other RNA
aaaggctctagaagacgtctt

SEQ ID NO: 289 - RNA, 21 nt, synthetic construct
  misc_feature 1..21: note = Synthetic
  misc_feature 1: note = Nucleotide linked to an inverted abasic cap
  modified_base 1: mod_base = OTHER; note = 2'-deoxy-2'-fluoro modified nucleotide
  modified_base 2: mod_base = OTHER; note = 2'-O-methyl modified nucleotide
  modified_base 3..4: mod_base = OTHER; note = 2'-deoxy-2'-fluoro modified nucleotide
  modified_base 5..6: mod_base = OTHER; note = 2'-O-methyl modified nucleotide
  modified_base 7: mod_base = OTHER; note = 2'-deoxy-2'-fluoro modified nucleotide
  modified_base 8..9: mod_base = OTHER; note = 2'-O-methyl modified nucleotide
  modified_base 10..12: mod_base = OTHER; note = 2'-deoxy-2'-fluoro modified nucleotide
  modified_base 13..15: mod_base = OTHER; note = 2'-O-methyl modified nucleotide
  modified_base 16: mod_base = OTHER; note = 2'-deoxy-2'-fluoro modified nucleotide
  modified_base 17..21: mod_base = OTHER; note = 2'-O-methyl modified nucleotide
  modified_base 20..21: mod_base = OTHER; note = phosphorothioate linkage
  misc_feature 21: note = Nucleotide linked to an inverted abasic cap
  source 1..21: mol_type = other RNA
tgttgataatccaaatggatt

SEQ ID NO: 290 - RNA, 21 nt, synthetic construct
  misc_feature 1..21: note = Synthetic
  modified_base 1..3: mod_base = OTHER; note = 2'-deoxy-2'-fluoro modified nucleotide
  modified_base 6..9: mod_base = OTHER; note = 2'-O-methyl modified nucleotide
  modified_base 16: mod_base = OTHER; note = 2'-O-methyl modified nucleotide
  modified_base 18..21: mod_base = OTHER; note = 2'-O-methyl modified nucleotide
  modified_base 20..21: mod_base = OTHER; note = phosphorothioate linkage
  source 1..21: mol_type = other RNA
aaaggctctagaagacgtctt

SEQ ID NO: 291 - DNA, 21 bp, synthetic construct
  misc_feature 1..21: note = Synthetic
  misc_feature 1: note = Nucleotide linked to an inverted abasic cap
  modified_base 3: mod_base = OTHER; note = 2'-deoxy-2'-fluoro modified nucleotide
  modified_base 5..10: mod_base = OTHER; note = 2'-deoxy-2'-fluoro modified nucleotide
  modified_base 15..16: mod_base = OTHER; note = 2'-deoxy-2'-fluoro modified nucleotide
  modified_base 17..21: mod_base = OTHER; note = 2'-O-methyl modified nucleotide
  modified_base 20..21: mod_base = OTHER; note = phosphorothioate linkage
  misc_feature 21: note = Nucleotide linked to an inverted abasic cap
  source 1..21: mol_type = other DNA
  misc_feature 1..2: note = DNA
  misc_feature 3: note = RNA
  misc_feature 4: note = DNA
  misc_feature 5..10: note = RNA
  misc_feature 11..14: note = DNA
  misc_feature 15..21: note = RNA
gacgtcttctagagccttttt

SEQ ID NO: 292 - DNA, 21 bp, synthetic construct
  misc_feature 1..21: note = Synthetic
  misc_feature 1: note = Nucleotide linked to an inverted abasic cap
  modified_base 2..3: mod_base = OTHER; note = 2'-deoxy-2'-fluoro modified nucleotide
  modified_base 7..9: mod_base = OTHER; note = 2'-deoxy-2'-fluoro modified nucleotide
  modified_base 12: mod_base = OTHER; note = 2'-deoxy-2'-fluoro modified nucleotide
  modified_base 16: mod_base = OTHER; note = 2'-deoxy-2'-fluoro modified nucleotide
  modified_base 17..21: mod_base = OTHER; note = 2'-O-methyl modified nucleotide
  modified_base 20..21: mod_base = OTHER; note = phosphorothioate linkage
  misc_feature 21: note = Nucleotide linked to an inverted abasic cap
  source 1..21: mol_type = other DNA
  misc_feature 1: note = DNA
  misc_feature 2..3: note = RNA
  misc_feature 4..6: note = DNA
  misc_feature 7..9: note = RNA
  misc_feature 10..11: note = DNA
  misc_feature 12: note = RNA
  misc_feature 13..15: note = DNA
  misc_feature 16..21: note = RNA
gttgaactcaataaacctttt

SEQ ID NO: 293 - RNA, 21 nt, synthetic construct
  misc_feature 1..21: note = Synthetic
  modified_base 5..7: mod_base = OTHER; note = 2'-O-methyl modified nucleotide
  modified_base 9..10: mod_base = OTHER; note = 2'-O-methyl modified nucleotide
  modified_base 15..16: mod_base = OTHER; note = 2'-O-methyl modified nucleotide
  modified_base 19..21: mod_base = OTHER; note = 2'-O-methyl modified nucleotide
  modified_base 1..2: mod_base = OTHER; note = phosphorothioate linkage
  modified_base 2..3: mod_base = OTHER; note = phosphorothioate linkage
  modified_base 20..21: mod_base = OTHER; note = phosphorothioate linkage
  source 1..21: mol_type = other RNA
aaggtttattgagttcaactt

SEQ ID NO: 294 - RNA, 21 nt, synthetic construct
  misc_feature 1..21: note = Synthetic
  modified_base 5..7: mod_base = OTHER; note = 2'-O-methyl modified nucleotide
  modified_base 11..12: mod_base = OTHER; note = 2'-O-methyl modified nucleotide
  modified_base 15: mod_base = OTHER; note = 2'-O-methyl modified nucleotide
  modified_base 18: mod_base = OTHER; note = 2'-O-methyl modified nucleotide
  modified_base 20..21: mod_base = OTHER; note = 2'-O-methyl modified nucleotide
  modified_base 20..21: mod_base = OTHER; note = phosphorothioate linkage
  source 1..21: mol_type = other RNA
tccatttggattatcaacatt

SEQ ID NO: 295 - RNA, 21 nt, synthetic construct
  misc_feature 1..21: note = Synthetic
  modified_base 1..3: mod_base = OTHER; note = 2'-deoxy-2'-fluoro modified nucleotide
  modified_base 5..7: mod_base = OTHER; note = 2'-O-methyl modified nucleotide
  modified_base 9..10: mod_base = OTHER; note = 2'-O-methyl modified nucleotide
  modified_base 15..16: mod_base = OTHER; note = 2'-O-methyl modified nucleotide
  modified_base 19..21: mod_base = OTHER; note = 2'-O-methyl modified nucleotide
  modified_base 20..21: mod_base = OTHER; note = phosphorothioate linkage
  source 1..21: mol_type = other RNA
aaggtttattgagttcaactt

SEQ ID NO: 296 - RNA, 21 nt, synthetic construct
  misc_feature 1..21: note = Synthetic
  misc_feature 1: note = Nucleotide linked to an inverted abasic cap
  modified_base 2..3: mod_base = OTHER; note = 2'-O-methyl modified nucleotide
  modified_base 7..9: mod_base = OTHER; note = 2'-O-methyl modified nucleotide
  modified_base 12: mod_base = OTHER; note = 2'-O-methyl modified nucleotide
  modified_base 16..21: mod_base = OTHER; note = 2'-O-methyl modified nucleotide
  modified_base 20..21: mod_base = OTHER; note = phosphorothioate linkage
  misc_feature 21: note = Nucleotide linked to an inverted abasic cap
  source 1..21: mol_type = other RNA
gttgaactcaataaacctttt

SEQ ID NO: 297 - RNA, 21 nt, synthetic construct
  misc_feature 1..21: note = Synthetic
  misc_feature 1: note = Nucleotide linked to an inverted abasic cap
  modified_base 7: mod_base = OTHER; note = 2'-deoxy-2'-fluoro modified nucleotide
  modified_base 9: mod_base = OTHER; note = 2'-deoxy-2'-fluoro modified nucleotide
  modified_base 11: mod_base = OTHER; note = 2'-deoxy-2'-fluoro modified nucleotide
  modified_base 14: mod_base = OTHER; note = 2'-deoxy-2'-fluoro modified nucleotide
  modified_base 16: mod_base = OTHER; note = 2'-deoxy-2'-fluoro modified nucleotide
  modified_base 18: mod_base = OTHER; note = 2'-deoxy-2'-fluoro modified nucleotide
  modified_base 20..21: mod_base = OTHER; note = 2'-O-methyl modified nucleotide
  modified_base 20..21: mod_base = OTHER; note = phosphorothioate linkage
  misc_feature 21: note = Nucleotide linked to an inverted abasic cap
  source 1..21: mol_type = other RNA
ggaagatgtgtgacatgtatt

SEQ ID NO: 298 - DNA, 21 bp, synthetic construct
  misc_feature 1..21: note = Synthetic
  misc_feature 1..19: note = ribonucleotide unmodified or modified as described for this sequence
  misc_feature 1: note = Nucleotide linked to an inverted abasic cap
  modified_base 2..3: mod_base = OTHER; note = 2'-deoxy-2'-fluoro modified nucleotide
  modified_base 7..9: mod_base = OTHER; note = 2'-deoxy-2'-fluoro modified nucleotide
  modified_base 12: mod_base = OTHER; note = 2'-deoxy-2'-fluoro modified nucleotide
  modified_base 16..19: mod_base = OTHER; note = 2'-deoxy-2'-fluoro modified nucleotide
  misc_feature 21: note = Nucleotide linked to an inverted abasic cap
  source 1..21: mol_type = other DNA
  misc_feature 1: note = DNA
  misc_feature 2..3: note = RNA
  misc_feature 4..6: note = DNA
  misc_feature 7..9: note = RNA
  misc_feature 10..11: note = DNA
  misc_feature 12: note = RNA
  misc_feature 13..15: note = DNA
  misc_feature 16..19: note = RNA
  misc_feature 20..21: note = DNA
gttgaactcaataaacctttt

SEQ ID NO: 299 - RNA, 21 nt, synthetic construct
  misc_feature 1..21: note = Synthetic
  modified_base 4: mod_base = OTHER; note = 2'-O-methyl modified nucleotide
  modified_base 5..7: mod_base = OTHER; note = 2'-deoxy-2'-fluoro modified nucleotide
  modified_base 8: mod_base = OTHER; note = 2'-O-methyl modified nucleotide
  modified_base 9..10: mod_base = OTHER; note = 2'-deoxy-2'-fluoro modified nucleotide
  modified_base 11..13: mod_base = OTHER; note = 2'-O-methyl modified nucleotide
  modified_base 14..16: mod_base = OTHER; note = 2'-deoxy-2'-fluoro modified nucleotide
  modified_base 17..18: mod_base = OTHER; note = 2'-O-methyl modified nucleotide
  modified_base 19: mod_base = OTHER; note = 2'-deoxy-2'-fluoro modified nucleotide
  modified_base 20..21: mod_base = OTHER; note = 2'-O-methyl modified nucleotide
  source 1..21: mol_type = other RNA
aaggtttattgagttcaactt

SEQ ID NO: 300 - DNA, 21 bp, synthetic construct
  misc_feature 1..21: note = Synthetic
  misc_feature 1..19: note = ribonucleotide unmodified or modified as described for this sequence
  misc_feature 1: note = Nucleotide linked to an inverted abasic cap
  modified_base 6: mod_base = OTHER; note = 2'-deoxy-2'-fluoro modified nucleotide
  modified_base 8: mod_base = OTHER; note = 2'-deoxy-2'-fluoro modified nucleotide
  modified_base 10: mod_base = OTHER; note = 2'-deoxy-2'-fluoro modified nucleotide
  modified_base 13: mod_base = OTHER; note = 2'-deoxy-2'-fluoro modified nucleotide
  modified_base 15: mod_base = OTHER; note = 2'-deoxy-2'-fluoro modified nucleotide
  modified_base 17: mod_base = OTHER; note = 2'-deoxy-2'-fluoro modified nucleotide
  modified_base 19: mod_base = OTHER; note = 2'-deoxy-2'-fluoro modified nucleotide
  misc_feature 21: note = Nucleotide linked to an inverted abasic cap
  source 1..21: mol_type = other DNA
  misc_feature 1..5: note = DNA
  misc_feature 6: note = RNA
  misc_feature 7: note = DNA
  misc_feature 8: note = RNA
  misc_feature 9: note = DNA
  misc_feature 10: note = RNA
  misc_feature 11..12: note = DNA
  misc_feature 13: note = RNA
  misc_feature 14: note = DNA
  misc_feature 15: note = RNA
  misc_feature 16: note = DNA
  misc_feature 17: note = RNA
  misc_feature 18: note = DNA
  misc_feature 19: note = RNA
  misc_feature 20..21: note = DNA
gaagatgtgtgacatgtattt

SEQ ID NO: 301 - RNA, 21 nt, synthetic construct
  misc_feature 1..21: note = Synthetic
  modified_base 4: mod_base = OTHER; note = 2'-deoxy-2'-fluoro modified nucleotide
  modified_base 5: mod_base = OTHER; note = 2'-O-methyl modified nucleotide
  modified_base 6: mod_base = OTHER; note = 2'-deoxy-2'-fluoro modified nucleotide
  modified_base 7: mod_base = OTHER; note = 2'-O-methyl modified nucleotide
  modified_base 8..9: mod_base = OTHER; note = 2'-deoxy-2'-fluoro modified nucleotide
  modified_base 10: mod_base = OTHER; note = 2'-O-methyl modified nucleotide
  modified_base 11: mod_base = OTHER; note = 2'-deoxy-2'-fluoro modified nucleotide
  modified_base 12: mod_base = OTHER; note = 2'-O-methyl modified nucleotide
  modified_base 13: mod_base = OTHER; note = 2'-deoxy-2'-fluoro modified nucleotide
  modified_base 15..19: mod_base = OTHER; note = 2'-deoxy-2'-fluoro modified nucleotide
  modified_base 20..21: mod_base = OTHER; note = 2'-O-methyl modified nucleotide
  source 1..21: mol_type = other RNA
atacatgtcacacatcttctt

SEQ ID NO: 302 - RNA, 21 nt, synthetic construct
  misc_feature 1..21: note = Synthetic
  modified_base 6..9: mod_base = OTHER; note = 2'-O-methyl modified nucleotide
  modified_base 16: mod_base = OTHER; note = 2'-O-methyl modified nucleotide
  modified_base 18..21: mod_base = OTHER; note = 2'-O-methyl modified nucleotide
  modified_base 1..2: mod_base = OTHER; note = phosphorothioate linkage
  modified_base 2..3: mod_base = OTHER; note = phosphorothioate linkage
  modified_base 20..21: mod_base = OTHER; note = phosphorothioate linkage
  source 1..21: mol_type = other RNA
aaaggctctagaagacgtctt

SEQ ID NO: 303 - RNA, 21 nt, synthetic construct
  misc_feature 1..21: note = Synthetic
  misc_feature 1: note = Nucleotide linked to an inverted abasic cap
  modified_base 1: mod_base = OTHER; note = 2'-deoxy-2'-fluoro modified nucleotide
  modified_base 2: mod_base = OTHER; note = 2'-O-methyl modified nucleotide
  modified_base 3: mod_base = OTHER; note = 2'-deoxy-2'-fluoro modified nucleotide
  modified_base 4: mod_base = OTHER; note = 2'-O-methyl modified nucleotide
  modified_base 5: mod_base = OTHER; note = 2'-deoxy-2'-fluoro modified nucleotide
  modified_base 6..7: mod_base = OTHER; note = 2'-O-methyl modified nucleotide
  modified_base 8: mod_base = OTHER; note = 2'-deoxy-2'-fluoro modified nucleotide
  modified_base 9: mod_base = OTHER; note = 2'-O-methyl modified nucleotide
  modified_base 10: mod_base = OTHER; note = 2'-deoxy-2'-fluoro modified nucleotide
  modified_base 11: mod_base = OTHER; note = 2'-O-methyl modified nucleotide
  modified_base 12: mod_base = OTHER; note = 2'-deoxy-2'-fluoro modified nucleotide
  modified_base 13: mod_base = OTHER; note = 2'-O-methyl modified nucleotide
  modified_base 14: mod_base = OTHER; note = 2'-deoxy-2'-fluoro modified nucleotide
  modified_base 15: mod_base = OTHER; note = 2'-O-methyl modified nucleotide
  modified_base 16: mod_base = OTHER; note = 2'-deoxy-2'-fluoro modified nucleotide
  modified_base 17: mod_base = OTHER; note = 2'-O-methyl modified nucleotide
  modified_base 18..19: mod_base = OTHER; note = 2'-deoxy-2'-fluoro modified nucleotide
  modified_base 20..21: mod_base = OTHER; note = 2'-O-methyl modified nucleotide
  modified_base 20..21: mod_base = OTHER; note = phosphorothioate linkage
  misc_feature 21: note = Nucleotide linked to an inverted abasic cap
  source 1..21: mol_type = other RNA
tgtgtgacatgtatatatttt

SEQ ID NO: 304 - DNA, 21 bp, synthetic construct
  misc_feature 1..21: note = Synthetic
  misc_feature 1..19: note = ribonucleotide unmodified or modified as described for this sequence
  misc_feature 1: note = Nucleotide linked to an inverted abasic cap
  modified_base 2: mod_base = OTHER; note = 2'-deoxy-2'-fluoro modified nucleotide
  modified_base 8..9: mod_base = OTHER; note = 2'-deoxy-2'-fluoro modified nucleotide
  modified_base 11: mod_base = OTHER; note = 2'-deoxy-2'-fluoro modified nucleotide
  modified_base 14..15: mod_base = OTHER; note = 2'-deoxy-2'-fluoro modified nucleotide
  modified_base 17..19: mod_base = OTHER; note = 2'-deoxy-2'-fluoro modified nucleotide
  misc_feature 21: note = Nucleotide linked to an inverted abasic cap
  source 1..21: mol_type = other DNA
  misc_feature 1: note = DNA
  misc_feature 2: note = RNA
  misc_feature 3..7: note = DNA
  misc_feature 8..9: note = RNA
  misc_feature 10: note = DNA
  misc_feature 11: note = RNA
  misc_feature 12..13: note = DNA
  misc_feature 14..15: note = RNA
  misc_feature 16: note = DNA
  misc_feature 17..19: note = RNA
  misc_feature 20..21: note = DNA
acgaaagccatggttgctttt

SEQ ID NO: 305 - RNA, 21 nt, synthetic construct
  misc_feature 1..21: note = Synthetic
  modified_base 4: mod_base = OTHER; note = 2'-deoxy-2'-fluoro modified nucleotide
  modified_base 5..6: mod_base = OTHER; note = 2'-O-methyl modified nucleotide
  modified_base 7..8: mod_base = OTHER; note = 2'-deoxy-2'-fluoro modified nucleotide
  modified_base 9: mod_base = OTHER; note = 2'-O-methyl modified nucleotide
  modified_base 10: mod_base = OTHER; note = 2'-deoxy-2'-fluoro modified nucleotide
  modified_base 11..12: mod_base = OTHER; note = 2'-O-methyl modified nucleotide
  modified_base 13..17: mod_base = OTHER; note = 2'-deoxy-2'-fluoro modified nucleotide
  modified_base 18: mod_base = OTHER; note = 2'-O-methyl modified nucleotide
  modified_base 19: mod_base = OTHER; note = 2'-deoxy-2'-fluoro modified nucleotide
  modified_base 20..21: mod_base = OTHER; note = 2'-O-methyl modified nucleotide
  source 1..21: mol_type = other RNA
aagcaaccatggctttcgttt

SEQ ID NO: 306 - DNA, 21 bp, synthetic construct
  misc_feature 1..21: note = Synthetic
  misc_feature 1..19: note = ribonucleotide unmodified or modified as described for this sequence
  misc_feature 1: note = Nucleotide linked to an inverted abasic cap
  modified_base 1: mod_base = OTHER; note = 2'-deoxy-2'-fluoro modified nucleotide
  modified_base 3: mod_base = OTHER; note = 2'-deoxy-2'-fluoro modified nucleotide
  modified_base 5: mod_base = OTHER; note = 2'-deoxy-2'-fluoro modified nucleotide
  modified_base 7: mod_base = OTHER; note = 2'-deoxy-2'-fluoro modified nucleotide
  modified_base 9..10: mod_base = OTHER; note = 2'-deoxy-2'-fluoro modified nucleotide
  modified_base 12..15: mod_base = OTHER; note = 2'-deoxy-2'-fluoro modified nucleotide
  modified_base 18: mod_base = OTHER; note = 2'-deoxy-2'-fluoro modified nucleotide
  misc_feature 21: note = Nucleotide linked to an inverted abasic cap
  source 1..21: mol_type = other DNA
  misc_feature 1: note = RNA
  misc_feature 2: note = DNA
  misc_feature 3: note = RNA
  misc_feature 4: note = DNA
  misc_feature 5: note = RNA
  misc_feature 6: note = DNA
  misc_feature 7: note = RNA
  misc_feature 8: note = DNA
  misc_feature 9..10: note = RNA
  misc_feature 11: note = DNA
  misc_feature 12..15: note = RNA
  misc_feature 16..17: note = DNA
  misc_feature 18: note = RNA
  misc_feature 19..21: note = DNA
tgtatatattatcttaatatt

SEQ ID NO: 307 - RNA, 21 nt, synthetic construct
  misc_feature 1..21: note = Synthetic
  modified_base 4: mod_base = OTHER; note = 2'-deoxy-2'-fluoro modified nucleotide
  modified_base 5..8: mod_base = OTHER; note = 2'-O-methyl modified nucleotide
  modified_base 9: mod_base = OTHER; note = 2'-deoxy-2'-fluoro modified nucleotide
  modified_base 10..11: mod_base = OTHER; note = 2'-O-methyl modified nucleotide
  modified_base 12: mod_base = OTHER; note = 2'-deoxy-2'-fluoro modified nucleotide
  modified_base 13: mod_base = OTHER; note = 2'-O-methyl modified nucleotide
  modified_base 14: mod_base = OTHER; note = 2'-deoxy-2'-fluoro modified nucleotide
  modified_base 15: mod_base = OTHER; note = 2'-O-methyl modified nucleotide
  modified_base 16: mod_base = OTHER; note = 2'-deoxy-2'-fluoro modified nucleotide
  modified_base 17: mod_base = OTHER; note = 2'-O-methyl modified nucleotide
  modified_base 18: mod_base = OTHER; note = 2'-deoxy-2'-fluoro modified nucleotide
  modified_base 19..21: mod_base = OTHER; note = 2'-O-methyl modified nucleotide
  source 1..21: mol_type = other RNA
tattaagataatatatacatt

SEQ ID NO: 308 - RNA, 21 nt, synthetic construct
  misc_feature 1..21: note = Synthetic
  misc_feature 1: note = Nucleotide linked to an inverted abasic cap
  modified_base 1..2: mod_base = OTHER; note = 2'-deoxy-2'-fluoro modified nucleotide
  modified_base 3..4: mod_base = OTHER; note = 2'-O-methyl modified nucleotide
  modified_base 5: mod_base = OTHER; note = 2'-deoxy-2'-fluoro modified nucleotide
  modified_base 6..7: mod_base = OTHER; note = 2'-O-methyl modified nucleotide
  modified_base 8..10: mod_base = OTHER; note = 2'-deoxy-2'-fluoro modified nucleotide
  modified_base 11..13: mod_base = OTHER; note = 2'-O-methyl modified nucleotide
  modified_base 14: mod_base = OTHER; note = 2'-deoxy-2'-fluoro modified nucleotide
  modified_base 15..21: mod_base = OTHER; note = 2'-O-methyl modified nucleotide
  modified_base 20..21: mod_base = OTHER; note = phosphorothioate linkage
  misc_feature 21: note = Nucleotide linked to an inverted abasic cap
  source 1..21: mol_type = other RNA
ttgataatccaaatggagatt

SEQ ID NO: 309 - RNA, 21 nt, synthetic construct
  misc_feature 1..21: note = Synthetic
  modified_base 6: mod_base = OTHER; note = 2'-O-methyl modified nucleotide
  modified_base 10..12: mod_base = OTHER; note = 2'-O-methyl modified nucleotide
  modified_base 15: mod_base = OTHER; note = 2'-O-methyl modified nucleotide
  modified_base 18..21: mod_base = OTHER; note = 2'-O-methyl modified nucleotide
  modified_base 20..21: mod_base = OTHER; note = phosphorothioate linkage
  source 1..21: mol_type = other RNA
tctccatttggattatcaatt

SEQ ID NO: 310 - RNA, 21 nt, synthetic construct
  misc_feature 1..21: note = Synthetic
  modified_base 4..5: mod_base = OTHER; note = 2'-O-methyl modified nucleotide
  modified_base 7: mod_base = OTHER; note = 2'-O-methyl modified nucleotide
  modified_base 13: mod_base = OTHER; note = 2'-O-methyl modified nucleotide
  modified_base 16: mod_base = OTHER; note = 2'-O-methyl modified nucleotide
  modified_base 19..21: mod_base = OTHER; note = 2'-O-methyl modified nucleotide
  modified_base 1..2: mod_base = OTHER; note = phosphorothioate linkage
  modified_base 2..3: mod_base = OTHER; note = phosphorothioate linkage
  modified_base 20..21: mod_base = OTHER; note = phosphorothioate linkage
  source 1..21: mol_type = other RNA
acttcatgagggttgcgactt

SEQ ID NO: 311 - RNA, 21 nt, synthetic construct
  misc_feature 1..21: note = Synthetic
  modified_base 2..3: mod_base = OTHER; note = 2'-deoxy-2'-fluoro modified nucleotide
  modified_base 4..5: mod_base = OTHER; note = 2'-O-methyl modified nucleotide
  modified_base 7: mod_base = OTHER; note = 2'-O-methyl modified nucleotide
  modified_base 13: mod_base = OTHER; note = 2'-O-methyl modified nucleotide
  modified_base 16: mod_base = OTHER; note = 2'-O-methyl modified nucleotide
  modified_base 19..21: mod_base = OTHER; note = 2'-O-methyl modified nucleotide
  modified_base 20..21: mod_base = OTHER; note = phosphorothioate linkage
  source 1..21: mol_type = other RNA
acttcatgagggttgcgactt

SEQ ID NO: 312 - DNA, 21 bp, synthetic construct
  misc_feature 1..21: note = Synthetic
  misc_feature 1..19: note = ribonucleotide unmodified or modified as described for this sequence
  misc_feature 1: note = Nucleotide linked to an inverted abasic cap
  modified_base 2: mod_base = OTHER; note = 2'-deoxy-2'-fluoro modified nucleotide
  modified_base 5: mod_base = OTHER; note = 2'-deoxy-2'-fluoro modified nucleotide
  modified_base 8..9: mod_base = OTHER; note = 2'-deoxy-2'-fluoro modified nucleotide
  modified_base 11..13: mod_base = OTHER; note = 2'-deoxy-2'-fluoro modified nucleotide
  modified_base 16: mod_base = OTHER; note = 2'-deoxy-2'-fluoro modified nucleotide
  modified_base 18..19: mod_base = OTHER; note = 2'-deoxy-2'-fluoro modified nucleotide
  misc_feature 21: note = Nucleotide linked to an inverted abasic cap
  source 1..21: mol_type = other DNA
  misc_feature 1: note = DNA
  misc_feature 2: note = RNA
  misc_feature 3..4: note = DNA
  misc_feature 5: note = RNA
  misc_feature 6..7: note = DNA
  misc_feature 8..9: note = RNA
  misc_feature 10: note = DNA
  misc_feature 11..13: note = RNA
  misc_feature 14..15: note = DNA
  misc_feature 16: note = RNA
  misc_feature 17: note = DNA
  misc_feature 18..19: note = RNA
  misc_feature 20..21: note = DNA
gcaataactgtttggtatttt

SEQ ID NO: 313 - RNA, 21 nt, synthetic construct
  misc_feature 1..21: note = Synthetic
  modified_base 4: mod_base = OTHER; note = 2'-O-methyl modified nucleotide
  modified_base 5..6: mod_base = OTHER; note = 2'-deoxy-2'-fluoro modified nucleotide
  modified_base 7..9: mod_base = OTHER; note = 2'-O-methyl modified nucleotide
  modified_base 10: mod_base = OTHER; note = 2'-deoxy-2'-fluoro modified nucleotide
  modified_base 11..12: mod_base = OTHER; note = 2'-O-methyl modified nucleotide
  modified_base 13..14: mod_base = OTHER; note = 2'-deoxy-2'-fluoro modified nucleotide
  modified_base 15: mod_base = OTHER; note = 2'-O-methyl modified nucleotide
  modified_base 16..17: mod_base = OTHER; note = 2'-deoxy-2'-fluoro modified nucleotide
  modified_base 18: mod_base = OTHER; note = 2'-O-methyl modified nucleotide
  modified_base 19: mod_base = OTHER; note = 2'-deoxy-2'-fluoro modified nucleotide
  modified_base 20..21: mod_base = OTHER; note = 2'-O-methyl modified nucleotide
  source 1..21: mol_type = other RNA
aataccaaacagttattgctt

SEQ ID NO: 314 - RNA, 21 nt, synthetic construct
  misc_feature 1..21: note = Synthetic
  modified_base 6..9: mod_base = OTHER; note = 2'-O-methyl modified nucleotide
  modified_base 16: mod_base = OTHER; note = 2'-O-methyl modified nucleotide
  modified_base 18..21: mod_base = OTHER; note = 2'-O-methyl modified nucleotide
  modified_base 1..2: mod_base = OTHER; note = phosphorothioate linkage
  modified_base 2..3: mod_base = OTHER; note = phosphorothioate linkage
  modified_base 3..4: mod_base = OTHER; note = phosphorothioate linkage
  modified_base 20..21: mod_base = OTHER; note = phosphorothioate linkage
  source 1..21: mol_type = other RNA
aaaggctctagaagacgtctt

SEQ ID NO: 315 - RNA, 21 nt, synthetic construct
  misc_feature 1..21: note = Synthetic
  modified_base 6..9: mod_base = OTHER; note = 2'-O-methyl modified nucleotide
  modified_base 16: mod_base = OTHER; note = 2'-O-methyl modified nucleotide
  modified_base 18..21: mod_base = OTHER; note = 2'-O-methyl modified nucleotide
  modified_base 2..3: mod_base = OTHER; note = phosphorothioate linkage
  modified_base 20..21: mod_base = OTHER; note = phosphorothioate linkage
  source 1..21: mol_type = other RNA
aaaggctctagaagacgtctt

SEQ ID NO: 316 - DNA, 21 bp, synthetic construct
  misc_feature 1..21: note = Synthetic
  misc_feature 1: note = Nucleotide linked to an inverted abasic cap
  modified_base 1..2: mod_base = OTHER; note = 2'-deoxy-2'-fluoro modified nucleotide
  modified_base 5: mod_base = OTHER; note = 2'-deoxy-2'-fluoro modified nucleotide
  modified_base 8..10: mod_base = OTHER; note = 2'-deoxy-2'-fluoro modified nucleotide
  modified_base 14: mod_base = OTHER; note = 2'-deoxy-2'-fluoro modified nucleotide
  modified_base 20..21: mod_base = OTHER; note = 2'-O-methyl modified nucleotide
  modified_base 20..21: mod_base = OTHER; note = phosphorothioate linkage
  misc_feature 21: note = Nucleotide linked to an inverted abasic cap
  source 1..21: mol_type = other DNA
  misc_feature 1..2: note = RNA
  misc_feature 3..4: note = DNA
  misc_feature 5: note = RNA
  misc_feature 6..7: note = DNA
  misc_feature 8..10: note = RNA
  misc_feature 11..13: note = DNA
  misc_feature 14: note = RNA
  misc_feature 15..19: note = DNA
  misc_feature 20..21: note = RNA
ttgataatccaaatggagatt

SEQ ID NO: 317 - RNA, 21 nt, synthetic construct
  misc_feature 1..21: note = Synthetic
  modified_base 6..9: mod_base = OTHER; note = 2'-O-methyl modified nucleotide
  modified_base 16: mod_base = OTHER; note = 2'-O-methyl modified nucleotide
  modified_base 18..21: mod_base = OTHER; note = 2'-O-methyl modified nucleotide
  modified_base 1..2: mod_base = OTHER; note = phosphorothioate linkage
  modified_base 20..21: mod_base = OTHER; note = phosphorothioate linkage
  source 1..21: mol_type = other RNA
aaaggctctagaagacgtctt

SEQ ID NO: 318 - RNA, 21 nt, synthetic construct
  misc_feature 1..21: note = Synthetic
  modified_base 4: mod_base = OTHER; note = 2'-O-methyl modified nucleotide
  modified_base 8..10: mod_base = OTHER; note = 2'-O-methyl modified nucleotide
  modified_base 13: mod_base = OTHER; note = 2'-O-methyl modified nucleotide
  modified_base 16..17: mod_base = OTHER; note = 2'-O-methyl modified nucleotide
  modified_base 19..21: mod_base = OTHER; note = 2'-O-methyl modified nucleotide
  modified_base 20..21: mod_base = OTHER; note = phosphorothioate linkage
  source 1..21: mol_type = other RNA
tccatttggattatcaacatt

SEQ ID NO: 319 - RNA, 21 nt, synthetic construct
  misc_feature 1..21: note = Synthetic
  misc_feature 1: note = Nucleotide linked to an inverted abasic cap
  modified_base 1: mod_base = OTHER; note = 2'-O-methyl modified nucleotide
  modified_base 3..4: mod_base = OTHER; note = 2'-O-methyl modified nucleotide
  modified_base 7: mod_base = OTHER; note = 2'-O-methyl modified nucleotide
  modified_base 9..10: mod_base = OTHER; note = 2'-O-methyl modified nucleotide
  modified_base 14..16: mod_base = OTHER; note = 2'-O-methyl modified nucleotide
  modified_base 20..21: mod_base = OTHER; note = 2'-O-methyl modified nucleotide
  modified_base 20..21: mod_base = OTHER; note = phosphorothioate linkage
  misc_feature 21: note = Nucleotide linked to an inverted abasic cap
  source 1..21: mol_type = other RNA
tgctgacattgaacccaaatt

SEQ ID NO: 320 - RNA, 21 nt, synthetic construct
  misc_feature 1..21: note = Synthetic
  modified_base 7..9: mod_base = OTHER; note = 2'-O-methyl modified nucleotide
  modified_base 12: mod_base = OTHER; note = 2'-O-methyl modified nucleotide
  modified_base 15: mod_base = OTHER; note = 2'-O-methyl modified nucleotide
  modified_base 18: mod_base = OTHER; note = 2'-O-methyl modified nucleotide
  modified_base 20..21: mod_base = OTHER; note = 2'-O-methyl modified nucleotide
  modified_base 2..3: mod_base = OTHER; note = phosphorothioate linkage
  modified_base 20..21: mod_base = OTHER; note = phosphorothioate linkage
  source 1..21: mol_type = other RNA
tttgggttcaatgtcagcatt

SEQ ID NO: 321 - DNA, 21 bp, synthetic construct
  misc_feature 1..21: note = Synthetic
  misc_feature 1..19: note = ribonucleotide unmodified or modified as described for this sequence
  misc_feature 1: note = Nucleotide linked to an inverted abasic cap
  modified_base 1: mod_base = OTHER; note = 2'-deoxy-2'-fluoro modified nucleotide
  modified_base 7..8: mod_base = OTHER; note = 2'-deoxy-2'-fluoro modified nucleotide
  modified_base 10: mod_base = OTHER; note = 2'-deoxy-2'-fluoro modified nucleotide
  modified_base 13..14: mod_base = OTHER; note = 2'-deoxy-2'-fluoro modified nucleotide
  modified_base 16..18: mod_base = OTHER; note = 2'-deoxy-2'-fluoro modified nucleotide
  misc_feature 21: note = Nucleotide linked to an inverted abasic cap
  source 1..21: mol_type = other DNA
  misc_feature 1: note = RNA
  misc_feature 2..6: note = DNA
  misc_feature 7..8: note = RNA
  misc_feature 9: note = DNA
  misc_feature 10: note = RNA
  misc_feature 11..12: note = DNA
  misc_feature 13..14: note = RNA
  misc_feature 15: note = DNA
  misc_feature 16..18: note = RNA
  misc_feature 19..21: note = DNA
cgaaagccatggttgcttgtt

SEQ ID NO: 322 - RNA, 21 nt, synthetic construct
  misc_feature 1..21: note = Synthetic
  modified_base 4: mod_base = OTHER; note = 2'-O-methyl modified nucleotide
  modified_base 5: mod_base = OTHER; note = 2'-deoxy-2'-fluoro modified nucleotide
  modified_base 6..7: mod_base = OTHER; note = 2'-O-methyl modified nucleotide
  modified_base 8..9: mod_base = OTHER; note = 2'-deoxy-2'-fluoro modified nucleotide
  modified_base 10: mod_base = OTHER; note = 2'-O-methyl modified nucleotide
  modified_base 11: mod_base = OTHER; note = 2'-deoxy-2'-fluoro modified nucleotide
  modified_base 12..13: mod_base = OTHER; note = 2'-O-methyl modified nucleotide
  modified_base 14..18: mod_base = OTHER; note = 2'-deoxy-2'-fluoro modified nucleotide
  modified_base 19..21: mod_base = OTHER; note = 2'-O-methyl modified nucleotide
  source 1..21: mol_type = other RNA
caagcaaccatggctttcgtt

SEQ ID NO: 323 - RNA, 21 nt, synthetic construct
  misc_feature 1..21: note = Synthetic
  modified_base 6..9: mod_base = OTHER; note = 2'-O-methyl modified nucleotide
  modified_base 16: mod_base = OTHER; note = 2'-O-methyl modified nucleotide
  modified_base 18..21: mod_base = OTHER; note = 2'-O-methyl modified nucleotide
  modified_base 2..3: mod_base = OTHER; note = phosphorothioate linkage
  modified_base 3..4: mod_base = OTHER; note = phosphorothioate linkage
  modified_base 20..21: mod_base = OTHER; note = phosphorothioate linkage
  source 1..21: mol_type = other RNA
aaaggctctagaagacgtctt

SEQ ID NO: 324 - DNA, 21 bp, synthetic construct
  misc_feature 1..21: note = Synthetic
  misc_feature 1: note = Nucleotide linked to an inverted abasic cap
  modified_base 1: mod_base = OTHER; note = 2'-deoxy-2'-fluoro modified nucleotide
  modified_base 3..4: mod_base = OTHER; note = 2'-deoxy-2'-fluoro modified nucleotide
  modified_base 7: mod_base = OTHER; note = 2'-deoxy-2'-fluoro modified nucleotide
  modified_base 10..12: mod_base = OTHER; note = 2'-deoxy-2'-fluoro modified nucleotide
  modified_base 16: mod_base = OTHER; note = 2'-deoxy-2'-fluoro modified nucleotide
  modified_base 20..21: mod_base = OTHER; note = 2'-O-methyl modified nucleotide
  modified_base 20..21: mod_base = OTHER; note = phosphorothioate linkage
  misc_feature 21: note = Nucleotide linked to an inverted abasic cap
  source 1..21: mol_type = other DNA
  misc_feature 1: note = RNA
  misc_feature 2: note = DNA
  misc_feature 3..4: note = RNA
  misc_feature 5..6: note = DNA
  misc_feature 7: note = RNA
  misc_feature 8..9: note = DNA
  misc_feature 10..12: note = RNA
  misc_feature 13..15: note = DNA
  misc_feature 16: note = RNA
  misc_feature 17..19: note = DNA
  misc_feature 20..21: note = RNA
tgttgataatccaaatggatt

SEQ ID NO: 325 - DNA, 21 bp, synthetic construct
  misc_feature 1..21: note = Synthetic
  misc_feature 1..19: note = ribonucleotide unmodified or modified as described for this sequence
  misc_feature 1: note = Nucleotide linked to an inverted abasic cap
  modified_base 1: mod_base = OTHER; note = 2'-deoxy-2'-fluoro modified nucleotide
  modified_base 7: mod_base = OTHER; note = 2'-deoxy-2'-fluoro modified nucleotide
  modified_base 9: mod_base = OTHER; note = 2'-deoxy-2'-fluoro modified nucleotide
  modified_base 11..14: mod_base = OTHER; note = 2'-deoxy-2'-fluoro modified nucleotide
  modified_base 18..19: mod_base = OTHER; note = 2'-deoxy-2'-fluoro modified nucleotide
  misc_feature 21: note = Nucleotide linked to an inverted abasic cap
  source 1..21: mol_type = other DNA
  misc_feature 1: note = RNA
  misc_feature 2..6: note = DNA
  misc_feature 7: note = RNA
  misc_feature 8: note = DNA
  misc_feature 9: note = RNA
  misc_feature 10: note = DNA
  misc_feature 11..14: note = RNA
  misc_feature 15..17: note = DNA
  misc_feature 18..19: note = RNA
  misc_feature 20..21: note = DNA
tggaggtatacttcgaatttt

SEQ ID NO: 326 - RNA, 21 nt, synthetic construct
  misc_feature 1..21: note = Synthetic
  modified_base 4..5: mod_base = OTHER; note = 2'-deoxy-2'-fluoro modified nucleotide
  modified_base 6..9: mod_base = OTHER; note = 2'-O-methyl modified nucleotide
  modified_base 10: mod_base = OTHER; note = 2'-deoxy-2'-fluoro modified nucleotide
  modified_base 11: mod_base = OTHER; note = 2'-O-methyl modified nucleotide
  modified_base 12: mod_base = OTHER; note = 2'-deoxy-2'-fluoro modified nucleotide
  modified_base 13: mod_base = OTHER; note = 2'-O-methyl modified nucleotide
  modified_base 14..18: mod_base = OTHER; note = 2'-deoxy-2'-fluoro modified nucleotide
  modified_base 19..21: mod_base = OTHER; note = 2'-O-methyl modified nucleotide
  source 1..21: mol_type = other RNA
aattcgaagtatacctccatt

SEQ ID NO: 327 - DNA, 21 bp, synthetic construct
  misc_feature 1..21: note = Synthetic
  misc_feature 1: note = Nucleotide linked to an inverted abasic cap
  modified_base 2: mod_base = OTHER; note = 2'-deoxy-2'-fluoro modified nucleotide
  modified_base 4: mod_base = OTHER; note = 2'-deoxy-2'-fluoro modified nucleotide
  modified_base 7: mod_base = OTHER; note = 2'-deoxy-2'-fluoro modified nucleotide
  modified_base 9: mod_base = OTHER; note = 2'-deoxy-2'-fluoro modified nucleotide
  modified_base 11: mod_base = OTHER; note = 2'-deoxy-2'-fluoro modified nucleotide
  modified_base 13: mod_base = OTHER; note = 2'-deoxy-2'-fluoro modified nucleotide
  modified_base 15: mod_base = OTHER; note = 2'-deoxy-2'-fluoro modified nucleotide
  modified_base 17..18: mod_base = OTHER; note = 2'-deoxy-2'-fluoro modified nucleotide
  modified_base 20..21: mod_base = OTHER; note = 2'-O-methyl modified nucleotide
  modified_base 20..21: mod_base = OTHER; note = phosphorothioate linkage
  misc_feature 21: note = Nucleotide linked to an inverted abasic cap
  source 1..21: mol_type = other DNA
  misc_feature 1: note = DNA
  misc_feature 2: note = RNA
  misc_feature 3: note = DNA
  misc_feature 4: note = RNA
  misc_feature 5..6: note = DNA
  misc_feature 7: note = RNA
  misc_feature 8: note = DNA
  misc_feature 9: note = RNA
  misc_feature 10: note = DNA
  misc_feature 11: note = RNA
  misc_feature 12: note = DNA
  misc_feature 13: note = RNA
  misc_feature 14: note = DNA
  misc_feature 15: note = RNA
  misc_feature 16: note = DNA
  misc_feature 17..18: note = RNA
  misc_feature 19: note = DNA
  misc_feature 20..21: note = RNA
gtgtgacatgtatatattatt

SEQ ID NO: 328 - DNA, 21 bp, synthetic construct
  misc_feature 1..21: note = Synthetic
  misc_feature 1..19: note = ribonucleotide unmodified or modified as described for this sequence
  misc_feature 1: note = Nucleotide linked to an inverted abasic cap
  modified_base 2: mod_base = OTHER; note = 2'-deoxy-2'-fluoro modified nucleotide
  modified_base 4: mod_base = OTHER; note = 2'-deoxy-2'-fluoro modified nucleotide
  modified_base 7: mod_base = OTHER; note = 2'-deoxy-2'-fluoro modified nucleotide
  modified_base 9: mod_base = OTHER; note = 2'-deoxy-2'-fluoro modified nucleotide
  modified_base 11: mod_base = OTHER; note = 2'-deoxy-2'-fluoro modified nucleotide
  modified_base 13: mod_base = OTHER; note = 2'-deoxy-2'-fluoro modified nucleotide
  modified_base 15: mod_base = OTHER; note = 2'-deoxy-2'-fluoro modified nucleotide
  modified_base 17..18: mod_base = OTHER; note = 2'-deoxy-2'-fluoro modified nucleotide
  modified_base 20..21: mod_base = OTHER; note = phosphorothioate linkage
  misc_feature 21: note = Nucleotide linked to an inverted abasic cap
  source 1..21: mol_type = other DNA
  misc_feature 1: note = DNA
  misc_feature 2: note = RNA
  misc_feature 3: note = DNA
  misc_feature 4: note = RNA
  misc_feature 5..6: note = DNA
  misc_feature 7: note = RNA
  misc_feature 8: note = DNA
  misc_feature 9: note = RNA
  misc_feature 10: note = DNA
  misc_feature 11: note = RNA
  misc_feature 12: note = DNA
  misc_feature 13: note = RNA
  misc_feature 14: note = DNA
  misc_feature 15: note = RNA
  misc_feature 16: note = DNA
  misc_feature 17..18: note = RNA
  misc_feature 19..21: note = DNA
gtgtgacatgtatatattatt

SEQ ID NO: 329 - RNA, 21 nt, synthetic construct
  misc_feature 1..21: note = Synthetic
  modified_base 7..9: mod_base = OTHER; note = 2'-O-methyl modified nucleotide
  modified_base 12: mod_base = OTHER; note = 2'-O-methyl modified nucleotide
  modified_base 15: mod_base = OTHER; note = 2'-O-methyl modified nucleotide
  modified_base 18: mod_base = OTHER; note = 2'-O-methyl modified nucleotide
  modified_base 20..21: mod_base = OTHER; note = 2'-O-methyl modified nucleotide
  modified_base 1..2: mod_base = OTHER; note = phosphorothioate linkage
  modified_base 2..3: mod_base = OTHER; note = phosphorothioate linkage
  modified_base 3..4: mod_base = OTHER; note = phosphorothioate linkage
  modified_base 20..21: mod_base = OTHER; note = phosphorothioate linkage
  source 1..21: mol_type = other RNA
tttgggttcaatgtcagcatt

SEQ ID NO: 330 - RNA, 21 nt, synthetic construct
  misc_feature 1..21: note = Synthetic
  modified_base 6..9: mod_base = OTHER; note = 2'-O-methyl modified nucleotide
  modified_base 16: mod_base = OTHER; note = 2'-O-methyl modified nucleotide
  modified_base 18..21: mod_base = OTHER; note = 2'-O-methyl modified nucleotide
  modified_base 20..21: mod_base = OTHER; note = phosphorothioate linkage
  source 1..21: mol_type = other RNA
aaaggctctagaagacgtctt

SEQ ID NO: 331 - RNA, 21 nt, synthetic construct
  misc_feature 1..21: note = Synthetic
  modified_base 5..7: mod_base = OTHER; note = 2'-O-methyl modified nucleotide
  modified_base 9..10: mod_base = OTHER; note = 2'-O-methyl modified nucleotide
  modified_base 15..16: mod_base = OTHER; note = 2'-O-methyl modified nucleotide
  modified_base 19..21: mod_base = OTHER; note = 2'-O-methyl modified nucleotide
  modified_base 1..2: mod_base = OTHER; note = phosphorothioate linkage
  modified_base 20..21: mod_base = OTHER; note = phosphorothioate linkage
  source 1..21: mol_type = other RNA
aaggtttattgagttcaactt

SEQ ID NO: 332 - DNA, 21 bp, synthetic construct
  misc_feature 1..21: note = Synthetic
  misc_feature 1..19: note = ribonucleotide unmodified or modified as described for this sequence
  misc_feature 1: note = Nucleotide linked to an inverted abasic cap
  modified_base 1: mod_base = OTHER; note = 2'-deoxy-2'-fluoro modified nucleotide
  modified_base 5: mod_base = OTHER; note = 2'-deoxy-2'-fluoro modified nucleotide
  modified_base 8: mod_base = OTHER; note = 2'-deoxy-2'-fluoro modified nucleotide
  modified_base 13: mod_base = OTHER; note = 2'-deoxy-2'-fluoro modified nucleotide
  modified_base 17..18: mod_base = OTHER; note = 2'-deoxy-2'-fluoro modified nucleotide
  misc_feature 21: note = Nucleotide linked to an inverted abasic cap
  source 1..21: mol_type = other DNA
  misc_feature 1: note = RNA
  misc_feature 2..4: note = DNA
  misc_feature 5: note = RNA
  misc_feature 6..7: note = DNA
  misc_feature 8: note = RNA
  misc_feature 9..12: note = DNA
  misc_feature 13: note = RNA
  misc_feature 14..16: note = DNA
  misc_feature 17..18: note = RNA
  misc_feature 19..21: note = DNA
cgggcaatggaacgggttatt

SEQ ID NO: 333 - RNA, 21 nt, synthetic construct
  misc_feature 1..21: note = Synthetic
  modified_base 4..6: mod_base = OTHER; note = 2'-deoxy-2'-fluoro modified nucleotide
  modified_base 7: mod_base = OTHER; note = 2'-O-methyl modified nucleotide
  modified_base 8..11: mod_base = OTHER; note = 2'-deoxy-2'-fluoro modified nucleotide
  modified_base 12: mod_base = OTHER; note = 2'-O-methyl modified nucleotide
  modified_base 13..14: mod_base = OTHER; note = 2'-deoxy-2'-fluoro modified nucleotide
  modified_base 15: mod_base = OTHER; note = 2'-O-methyl modified nucleotide
  modified_base 16..18: mod_base = OTHER; note = 2'-deoxy-2'-fluoro modified nucleotide
  modified_base 19..21: mod_base = OTHER; note = 2'-O-methyl modified nucleotide
  source 1..21: mol_type = other RNA
taacccgttccattgcccgtt

SEQ ID NO: 334 - RNA, 21 nt, synthetic construct
  misc_feature 1..21: note = Synthetic
  misc_feature 1: note = Nucleotide linked to an inverted abasic cap
  modified_base 20..21: mod_base = OTHER; note = 2'-O-methyl modified nucleotide
  modified_base 20..21: mod_base = OTHER; note = phosphorothioate linkage
  misc_feature 21: note = Nucleotide linked to an inverted abasic cap
  source 1..21: mol_type = other RNA
ttgataatccaaatggagatt

SEQ ID NO: 335 - RNA, 21 nt, synthetic construct
  misc_feature 1..21: note = Synthetic
  modified_base 20..21: mod_base = OTHER; note = 2'-O-methyl modified nucleotide
  modified_base 20..21: mod_base = OTHER; note = phosphorothioate linkage
  source 1..21: mol_type = other RNA
tctccatttggattatcaatt

SEQ ID NO: 336 - DNA, 21 bp, synthetic construct
  misc_feature 1..21: note = Synthetic
  misc_feature 1..19: note = ribonucleotide unmodified or modified as described for this sequence
  misc_feature 1: note = Nucleotide linked to an inverted abasic cap
  modified_base 3..4: mod_base = OTHER; note = 2'-deoxy-2'-fluoro modified nucleotide
  modified_base 6: mod_base = OTHER; note = 2'-deoxy-2'-fluoro modified nucleotide
  modified_base 9..10: mod_base = OTHER; note = 2'-deoxy-2'-fluoro modified nucleotide
  modified_base 12..14: mod_base = OTHER; note = 2'-deoxy-2'-fluoro modified nucleotide
  modified_base 16..17: mod_base = OTHER; note = 2'-deoxy-2'-fluoro modified nucleotide
  modified_base 19: mod_base = OTHER; note = 2'-deoxy-2'-fluoro modified nucleotide
  misc_feature 21: note = Nucleotide linked to an inverted abasic cap
  source 1..21: mol_type = other DNA
  misc_feature 1..2: note = DNA
  misc_feature 3..4: note = RNA
  misc_feature 5: note = DNA
  misc_feature 6: note = RNA
  misc_feature 7..8: note = DNA
  misc_feature 9..10: note = RNA
  misc_feature 11: note = DNA
  misc_feature 12..14: note = RNA
  misc_feature 15: note = DNA
  misc_feature 16..17: note = RNA
  misc_feature 18: note = DNA
  misc_feature 19: note = RNA
  misc_feature 20..21: note = DNA
agccatggttgcttgttattt

SEQ ID NO: 337 - RNA, 21 nt, synthetic construct
  misc_feature 1..21: note = Synthetic
  modified_base 4: mod_base = OTHER; note = 2'-O-methyl modified nucleotide
  modified_base 5: mod_base = OTHER; note = 2'-deoxy-2'-fluoro modified nucleotide
  modified_base 6..8: mod_base = OTHER; note = 2'-O-methyl modified nucleotide
  modified_base 9: mod_base = OTHER; note = 2'-deoxy-2'-fluoro modified nucleotide
  modified_base 10..11: mod_base = OTHER; note = 2'-O-methyl modified nucleotide
  modified_base 12..13: mod_base = OTHER; note = 2'-deoxy-2'-fluoro modified nucleotide
  modified_base 15: mod_base = OTHER; note = 2'-deoxy-2'-fluoro modified nucleotide
  modified_base 16..17: mod_base = OTHER; note = 2'-O-methyl modified nucleotide
  modified_base 18..19: mod_base = OTHER; note = 2'-deoxy-2'-fluoro modified nucleotide
  modified_base 20..21: mod_base = OTHER; note = 2'-O-methyl modified nucleotide
  source 1..21: mol_type = other RNA
ataacaagcaaccatggcttt

SEQ ID NO: 338 - RNA, 21 nt, synthetic construct
  misc_feature 1..21: note = Synthetic
  modified_base 6..9: mod_base = OTHER; note = 2'-O-methyl modified nucleotide
  modified_base 16: mod_base = OTHER; note = 2'-O-methyl modified nucleotide
  modified_base 18..21: mod_base = OTHER; note = 2'-O-methyl modified nucleotide
  modified_base 1..2: mod_base = OTHER; note = phosphorothioate linkage
  modified_base 3..4: mod_base = OTHER; note = phosphorothioate linkage
  modified_base 20..21: mod_base = OTHER; note = phosphorothioate linkage
  source 1..21: mol_type = other RNA
aaaggctctagaagacgtctt

SEQ ID NO: 339 - RNA, 21 nt, synthetic construct
  misc_feature 1..21: note = Synthetic
  modified_base 1..3: mod_base = OTHER; note = 2'-deoxy-2'-fluoro modified nucleotide
  modified_base 4..5: mod_base = OTHER; note = 2'-O-methyl modified nucleotide
  modified_base 7: mod_base = OTHER; note = 2'-O-methyl modified nucleotide
  modified_base 13: mod_base = OTHER; note = 2'-O-methyl modified nucleotide
  modified_base 16: mod_base = OTHER; note = 2'-O-methyl modified nucleotide
  modified_base 19..21: mod_base = OTHER; note = 2'-O-methyl modified nucleotide
  modified_base 20..21: mod_base = OTHER; note = phosphorothioate linkage
  source 1..21: mol_type = other RNA
acttcatgagggttgcgactt

SEQ ID NO: 340 - RNA, 21 nt, synthetic construct
  misc_feature 1..21: note = Synthetic
  modified_base 4..6: mod_base = OTHER; note = 2'-O-methyl modified nucleotide
  modified_base 8..9: mod_base = OTHER; note = 2'-O-methyl modified nucleotide
  modified_base 11: mod_base = OTHER; note = 2'-O-methyl modified nucleotide
  modified_base 13: mod_base = OTHER; note = 2'-O-methyl modified nucleotide
  modified_base 15: mod_base = OTHER; note = 2'-O-methyl modified nucleotide
  modified_base 17: mod_base = OTHER; note = 2'-O-methyl modified nucleotide
  modified_base 19..21: mod_base = OTHER; note = 2'-O-methyl modified nucleotide
  modified_base 20..21: mod_base = OTHER; note = phosphorothioate linkage
  source 1..21: mol_type = other RNA
ttaagataatatatacatgtt

SEQ ID NO: 341 - RNA, 21 nt, synthetic construct
  misc_feature 1..21: note = Synthetic
  modified_base 4..5: mod_base = OTHER; note = 2'-O-methyl modified nucleotide
  modified_base 7: mod_base = OTHER; note = 2'-O-methyl modified nucleotide
  modified_base 13: mod_base = OTHER; note = 2'-O-methyl modified nucleotide
  modified_base 16: mod_base = OTHER; note = 2'-O-methyl modified nucleotide
  modified_base 19..21: mod_base = OTHER; note = 2'-O-methyl modified nucleotide
  modified_base 1..2: mod_base = OTHER; note = phosphorothioate linkage
  modified_base 2..3: mod_base = OTHER; note = phosphorothioate linkage
  modified_base 3..4: mod_base = OTHER; note = phosphorothioate linkage
  modified_base 20..21: mod_base = OTHER; note = phosphorothioate linkage
  source 1..21: mol_type = other RNA
acttcatgagggttgcgactt

SEQ ID NO: 342 - DNA, 21 bp, synthetic construct
  misc_feature 1..21: note = Synthetic
  misc_feature 1..19: note = ribonucleotide unmodified or modified as described for this sequence
  misc_feature 1: note = Nucleotide linked to an inverted abasic cap
  modified_base 1..2: mod_base = OTHER; note = 2'-deoxy-2'-fluoro modified nucleotide
  modified_base 4: mod_base = OTHER; note = 2'-deoxy-2'-fluoro modified nucleotide
  modified_base 7..11: mod_base = OTHER; note = 2'-deoxy-2'-fluoro modified nucleotide
  modified_base 13: mod_base = OTHER; note = 2'-deoxy-2'-fluoro modified nucleotide
  modified_base 18: mod_base = OTHER; note = 2'-deoxy-2'-fluoro modified nucleotide
  misc_feature 21: note = Nucleotide linked to an inverted abasic cap
  source 1..21: mol_type = other DNA
  misc_feature 1..2: note = RNA
  misc_feature 3: note = DNA
  misc_feature 4: note = RNA
  misc_feature 5..6: note = DNA
  misc_feature 7..11: note = RNA
  misc_feature 12: note = DNA
  misc_feature 13: note = RNA
  misc_feature 14..17: note = DNA
  misc_feature 18: note = RNA
  misc_feature 19..21: note = DNA
tcgcaaccctcatgaagtatt

SEQ ID NO: 343 - RNA, 21 nt, synthetic construct
  misc_feature 1..21: note = Synthetic
  modified_base 4..6: mod_base = OTHER; note = 2'-deoxy-2'-fluoro modified nucleotide
  modified_base 7: mod_base = OTHER; note = 2'-O-methyl modified nucleotide
  modified_base 8: mod_base = OTHER; note = 2'-deoxy-2'-fluoro modified nucleotide
  modified_base 9..13: mod_base = OTHER; note = 2'-O-methyl modified nucleotide
  modified_base 14..15: mod_base = OTHER; note = 2'-deoxy-2'-fluoro modified nucleotide
  modified_base 16: mod_base = OTHER; note = 2'-O-methyl modified nucleotide
  modified_base 17: mod_base = OTHER; note = 2'-deoxy-2'-fluoro modified nucleotide
  modified_base 18..21: mod_base = OTHER; note = 2'-O-methyl modified nucleotide
  source 1..21: mol_type = other RNA
tacttcatgagggttgcgatt

SEQ ID NO: 344 - DNA, 21 bp, synthetic construct
  misc_feature 1..21: note = Synthetic
  misc_feature 1..19: note = ribonucleotide unmodified or modified as described for this sequence
  misc_feature 1: note = Nucleotide linked to an inverted abasic cap
  modified_base 3..7: mod_base = OTHER; note = 2'-deoxy-2'-fluoro modified nucleotide
  modified_base 10..12: mod_base = OTHER; note = 2'-deoxy-2'-fluoro modified nucleotide
  modified_base 15: mod_base = OTHER; note = 2'-deoxy-2'-fluoro modified nucleotide
  modified_base 18: mod_base = OTHER; note = 2'-deoxy-2'-fluoro modified nucleotide
  misc_feature 21: note = Nucleotide linked to an inverted abasic cap
  source 1..21: mol_type = other DNA
  misc_feature 1..2: note = DNA
  misc_feature 3..7: note = RNA
  misc_feature 8..9: note = DNA
  misc_feature 10..12: note = RNA
  misc_feature 13..14: note = DNA
  misc_feature 15: note = RNA
  misc_feature 16..17: note = DNA
  misc_feature 18: note = RNA
  misc_feature 19..21: note = DNA
agcctttgatccagcaatatt

SEQ ID NO: 345 - RNA, 21 nt, synthetic construct
  misc_feature 1..21: note = Synthetic
  modified_base 4: mod_base = OTHER; note = 2'-deoxy-2'-fluoro modified nucleotide
  modified_base 5: mod_base = OTHER; note = 2'-O-methyl modified nucleotide
  modified_base 6..7: mod_base = OTHER; note = 2'-deoxy-2'-fluoro modified nucleotide
  modified_base 8..10: mod_base = OTHER; note = 2'-O-methyl modified nucleotide
  modified_base 11..12: mod_base = OTHER; note = 2'-deoxy-2'-fluoro modified nucleotide
  modified_base 13: mod_base = OTHER; note = 2'-O-methyl modified nucleotide
  modified_base 15..17: mod_base = OTHER; note = 2'-O-methyl modified nucleotide
  modified_base 18..19: mod_base = OTHER; note = 2'-deoxy-2'-fluoro modified nucleotide
  modified_base 20..21: mod_base = OTHER; note = 2'-O-methyl modified nucleotide
  source 1..21: mol_type = other RNA
tattgctggatcaaaggcttt

SEQ ID NO: 346 - DNA, 21 bp, synthetic construct
  misc_feature 1..21: note = Synthetic
  misc_feature 1..19: note = ribonucleotide unmodified or modified as described for this sequence
  misc_feature 1: note = Nucleotide linked to an inverted abasic cap
  modified_base 2..3: mod_base = OTHER; note = 2'-deoxy-2'-fluoro modified nucleotide
  modified_base 5: mod_base = OTHER; note = 2'-deoxy-2'-fluoro modified nucleotide
  modified_base 8..12: mod_base = OTHER; note = 2'-deoxy-2'-fluoro modified nucleotide
  modified_base 14: mod_base = OTHER; note = 2'-deoxy-2'-fluoro modified nucleotide
  modified_base 19: mod_base = OTHER; note = 2'-deoxy-2'-fluoro modified nucleotide
  misc_feature 21: note = Nucleotide linked to an inverted abasic cap
  source 1..21: mol_type = other DNA
  misc_feature 1: note = DNA
  misc_feature 2..3: note = RNA
  misc_feature 4: note = DNA
  misc_feature 5: note = RNA
  misc_feature 6..7: note = DNA
  misc_feature 8..12: note = RNA
  misc_feature 13: note = DNA
  misc_feature 14: note = RNA
  misc_feature 15..18: note = DNA
  misc_feature 19: note = RNA
  misc_feature 20..21: note = DNA
gtcgcaaccctcatgaagttt

SEQ ID NO: 347 - DNA, 21 bp, synthetic construct
  misc_feature 1..21: note = Synthetic
  misc_feature 1..19: note = ribonucleotide unmodified or modified as described for this sequence
  misc_feature 1: note = Nucleotide linked to an inverted abasic cap
  modified_base 1: mod_base = OTHER; note = 2'-deoxy-2'-fluoro modified nucleotide
  modified_base 3..4: mod_base = OTHER; note = 2'-deoxy-2'-fluoro modified nucleotide
  modified_base 8..10: mod_base = OTHER; note = 2'-deoxy-2'-fluoro modified nucleotide
  modified_base 14..16: mod_base = OTHER; note = 2'-deoxy-2'-fluoro modified nucleotide
  modified_base 19: mod_base = OTHER; note = 2'-deoxy-2'-fluoro modified nucleotide
  misc_feature 21: note = Nucleotide linked to an inverted abasic cap
  source 1..21: mol_type = other DNA
  misc_feature 1: note = RNA
  misc_feature 2: note = DNA
  misc_feature 3..4: note = RNA
  misc_feature 5..7: note = DNA
  misc_feature 8..10: note = RNA
  misc_feature 11..13: note = DNA
  misc_feature 14..16: note = RNA
  misc_feature 17..18: note = DNA
  misc_feature 19: note = RNA
  misc_feature 20..21: note = DNA
cattgaacccaaatttgattt

SEQ ID NO: 348 - RNA, 21 nt, synthetic construct
  misc_feature 1..21: note = Synthetic
  modified_base 4..6: mod_base = OTHER; note = 2'-O-methyl modified nucleotide
  modified_base 7..9: mod_base = OTHER; note = 2'-deoxy-2'-fluoro modified nucleotide
  modified_base 10..12: mod_base = OTHER; note = 2'-O-methyl modified nucleotide
  modified_base 13..15: mod_base = OTHER; note = 2'-deoxy-2'-fluoro modified nucleotide
  modified_base 16..17: mod_base = OTHER; note = 2'-O-methyl modified nucleotide
  modified_base 18: mod_base = OTHER; note = 2'-deoxy-2'-fluoro modified nucleotide
  modified_base 19..21: mod_base = OTHER; note = 2'-O-methyl modified nucleotide
  source 1..21: mol_type = other RNA
atcaaatttgggttcaatgtt

SEQ ID NO: 349 - DNA, 21 bp, synthetic construct
  misc_feature 1..21: note = Synthetic
  misc_feature 1: note = Nucleotide linked to an inverted abasic cap
  modified_base 1: mod_base = OTHER; note = 2'-deoxy-2'-fluoro modified nucleotide
  modified_base 3..4: mod_base = OTHER; note = 2'-deoxy-2'-fluoro modified nucleotide
  modified_base 7: mod_base = OTHER; note = 2'-deoxy-2'-fluoro modified nucleotide
  modified_base 9..10: mod_base = OTHER; note = 2'-deoxy-2'-fluoro modified nucleotide
  modified_base 14..16: mod_base = OTHER; note = 2'-deoxy-2'-fluoro modified nucleotide
  modified_base 17..21: mod_base = OTHER; note = 2'-O-methyl modified nucleotide
  modified_base 20..21: mod_base = OTHER; note = phosphorothioate linkage
  misc_feature 21: note = Nucleotide linked to an inverted abasic cap
  source 1..21: mol_type = other DNA
  misc_feature 1: note = RNA
  misc_feature 2: note = DNA
  misc_feature 3..4: note = RNA
  misc_feature 5..6: note = DNA
  misc_feature 7: note = RNA
  misc_feature 8: note = DNA
  misc_feature 9..10: note = RNA
  misc_feature 11..13: note = DNA
  misc_feature 14..21: note = RNA
tgctgacattgaacccaaatt

SEQ ID NO: 350 - RNA, 21 nt, synthetic construct
  misc_feature 1..21: note = Synthetic
  modified_base 7..9: mod_base = OTHER; note = 2'-O-methyl modified nucleotide
  modified_base 12: mod_base = OTHER; note = 2'-O-methyl modified nucleotide
  modified_base 15: mod_base = OTHER; note = 2'-O-methyl modified nucleotide
  modified_base 18: mod_base = OTHER; note = 2'-O-methyl modified nucleotide
  modified_base 20..21: mod_base = OTHER; note = 2'-O-methyl modified nucleotide
  modified_base 1..2: mod_base = OTHER; note = phosphorothioate linkage
  modified_base 20..21: mod_base = OTHER; note = phosphorothioate linkage
  source 1..21: mol_type = other RNA
tttgggttcaatgtcagcatt

SEQ ID NO: 351 - RNA, 21 nt, synthetic construct
  misc_feature 1..21: note = Synthetic
  modified_base 1..3: mod_base = OTHER; note = 2'-deoxy-2'-fluoro modified nucleotide
  modified_base 7..9: mod_base = OTHER; note = 2'-O-methyl modified nucleotide
  modified_base 12: mod_base = OTHER; note = 2'-O-methyl modified nucleotide
  modified_base 15: mod_base = OTHER; note = 2'-O-methyl modified nucleotide
  modified_base 18: mod_base = OTHER; note = 2'-O-methyl modified nucleotide
  modified_base 20..21: mod_base = OTHER; note = 2'-O-methyl modified nucleotide
  modified_base 20..21: mod_base = OTHER; note = phosphorothioate linkage
  source 1..21: mol_type = other RNA
tttgggttcaatgtcagcatt

SEQ ID NO: 352 - RNA, 21 nt, synthetic construct
  misc_feature 1..21: note = Synthetic
  modified_base 7..9: mod_base = OTHER; note = 2'-O-methyl modified nucleotide
  modified_base 12: mod_base = OTHER; note = 2'-O-methyl modified nucleotide
  modified_base 15: mod_base = OTHER; note = 2'-O-methyl modified nucleotide
  modified_base 18: mod_base = OTHER; note = 2'-O-methyl modified nucleotide
  modified_base 20..21: mod_base = OTHER; note = 2'-O-methyl modified nucleotide
  modified_base 2..3: mod_base = OTHER; note = phosphorothioate linkage
  modified_base 3..4: mod_base = OTHER; note = phosphorothioate linkage
  modified_base 20..21: mod_base = OTHER; note = phosphorothioate linkage
  source 1..21: mol_type = other RNA
tttgggttcaatgtcagcatt

SEQ ID NO: 353 - RNA, 21 nt, synthetic construct
  misc_feature 1..21: note = Synthetic
  modified_base 4..5: mod_base = OTHER; note = 2'-O-methyl modified nucleotide
  modified_base 7: mod_base = OTHER; note = 2'-O-methyl modified nucleotide
  modified_base 13: mod_base = OTHER; note = 2'-O-methyl modified nucleotide
  modified_base 16: mod_base = OTHER; note = 2'-O-methyl modified nucleotide
  modified_base 19..21: mod_base = OTHER; note = 2'-O-methyl modified nucleotide
  modified_base 2..3: mod_base = OTHER; note = phosphorothioate linkage
  modified_base 20..21: mod_base = OTHER; note = phosphorothioate linkage
  source 1..21: mol_type = other RNA
acttcatgagggttgcgactt

SEQ ID NO: 354 - RNA, 21 nt, synthetic construct
  misc_feature 1..21: note = Synthetic
  modified_base 4..5: mod_base = OTHER; note = 2'-O-methyl modified nucleotide
  modified_base 7..9: mod_base = OTHER; note = 2'-O-methyl modified nucleotide
  modified_base 13: mod_base = OTHER; note = 2'-O-methyl modified nucleotide
  modified_base 16..17: mod_base = OTHER; note = 2'-O-methyl modified nucleotide
  modified_base 20..21: mod_base = OTHER; note = 2'-O-methyl modified nucleotide
  modified_base 20..21: mod_base = OTHER; note = phosphorothioate linkage
  source 1..21: mol_type = other RNA
tctccatttggattatcaatt

SEQ ID NO: 355 - DNA, 21 bp, synthetic construct
  misc_feature 1..21: note = Synthetic
  misc_feature 1..19: note = ribonucleotide unmodified or modified as described for this sequence
  misc_feature 1: note = Nucleotide linked to an inverted abasic cap
  modified_base 3..4: mod_base = OTHER; note = 2'-deoxy-2'-fluoro modified nucleotide
  modified_base 9: mod_base = OTHER; note = 2'-deoxy-2'-fluoro modified nucleotide
  modified_base 11..12: mod_base = OTHER; note = 2'-deoxy-2'-fluoro modified nucleotide
  modified_base 17: mod_base = OTHER; note = 2'-deoxy-2'-fluoro modified nucleotide
  misc_feature 21: note = Nucleotide linked to an inverted abasic cap
  source 1..21: mol_type = other DNA
  misc_feature 1..2: note = DNA
  misc_feature 3..4: note = RNA
  misc_feature 5..8: note = DNA
  misc_feature 9: note = RNA
  misc_feature 10: note = DNA
  misc_feature 11..12: note = RNA
  misc_feature 13..16: note = DNA
  misc_feature 17: note = RNA
  misc_feature 18..21: note = DNA
gactgggatgccaaggtaatt

SEQ ID NO: 356 - RNA, 21 nt, synthetic construct
  misc_feature 1..21: note = Synthetic
  modified_base 4..7: mod_base = OTHER; note = 2'-deoxy-2'-fluoro modified nucleotide
  modified_base 8..9: mod_base = OTHER; note = 2'-O-methyl modified nucleotide
  modified_base 10: mod_base = OTHER; note = 2'-deoxy-2'-fluoro modified nucleotide
  modified_base 11: mod_base = OTHER; note = 2'-O-methyl modified nucleotide
  modified_base 12..15: mod_base = OTHER; note = 2'-deoxy-2'-fluoro modified nucleotide
  modified_base 16..17: mod_base = OTHER; note = 2'-O-methyl modified nucleotide
  modified_base 18..19: mod_base = OTHER; note = 2'-deoxy-2'-fluoro modified nucleotide
  modified_base 20..21: mod_base = OTHER; note = 2'-O-methyl modified nucleotide
  source 1..21: mol_type = other RNA
ttaccttggcatcccagtctt

SEQ ID NO: 357 - RNA, 21 nt, synthetic construct
  misc_feature 1..21: note = Synthetic
  modified_base 5..7: mod_base = OTHER; note = 2'-O-methyl modified nucleotide
  modified_base 9..10: mod_base = OTHER; note = 2'-O-methyl modified nucleotide
  modified_base 15..16: mod_base = OTHER; note = 2'-O-methyl modified nucleotide
  modified_base 19..21: mod_base = OTHER; note = 2'-O-methyl modified nucleotide
  modified_base 1..2: mod_base = OTHER; note = phosphorothioate linkage
  modified_base 2..3: mod_base = OTHER; note = phosphorothioate linkage
  modified_base 3..4: mod_base = OTHER; note = phosphorothioate linkage
  modified_base 20..21: mod_base = OTHER; note = phosphorothioate linkage
  source 1..21: mol_type = other RNA
aaggtttattgagttcaactt

SEQ ID NO: 358 - DNA, 21 bp, synthetic construct
  misc_feature 1..21: note = Synthetic
  misc_feature 1..19: note = ribonucleotide unmodified or modified as described for this sequence
  misc_feature 1: note = Nucleotide linked to an inverted abasic cap
  modified_base 2: mod_base = OTHER; note = 2'-deoxy-2'-fluoro modified nucleotide
  modified_base 4..7: mod_base = OTHER; note = 2'-deoxy-2'-fluoro modified nucleotide
  modified_base 10: mod_base = OTHER; note = 2'-deoxy-2'-fluoro modified nucleotide
  modified_base 12: mod_base = OTHER; note = 2'-deoxy-2'-fluoro modified nucleotide
  modified_base 16: mod_base = OTHER; note = 2'-deoxy-2'-fluoro modified nucleotide
  misc_feature 21: note = Nucleotide linked to an inverted abasic cap
  source 1..21: mol_type = other DNA
  misc_feature 1: note = DNA
  misc_feature 2: note = RNA
  misc_feature 3: note = DNA
  misc_feature 4..7: note = RNA
  misc_feature 8..9: note = DNA
  misc_feature 10: note = RNA
  misc_feature 11: note = DNA
  misc_feature 12: note = RNA
  misc_feature 13..15: note = DNA
  misc_feature 16: note = RNA
  misc_feature 17..21: note = DNA
gtattttgatgcagatgagtt

SEQ ID NO: 359 - RNA, 21 nt, synthetic construct
  misc_feature 1..21: note = Synthetic
  modified_base 4: mod_base = OTHER; note = 2'-O-methyl modified nucleotide
  modified_base 5..7: mod_base = OTHER; note = 2'-deoxy-2'-fluoro modified nucleotide
  modified_base 8: mod_base = OTHER; note = 2'-O-methyl modified nucleotide
  modified_base 9: mod_base = OTHER; note = 2'-deoxy-2'-fluoro modified nucleotide
  modified_base 10: mod_base = OTHER; note = 2'-O-methyl modified nucleotide
  modified_base 11..12: mod_base = OTHER; note = 2'-deoxy-2'-fluoro modified nucleotide
  modified_base 13: mod_base = OTHER; note = 2'-O-methyl modified nucleotide
  modified_base 15..16: mod_base = OTHER; note = 2'-O-methyl modified nucleotide
  modified_base 17: mod_base = OTHER; note = 2'-deoxy-2'-fluoro modified nucleotide
  modified_base 18: mod_base = OTHER; note = 2'-O-methyl modified nucleotide
  modified_base 19: mod_base = OTHER; note = 2'-deoxy-2'-fluoro modified nucleotide
  modified_base 20..21: mod_base = OTHER; note = 2'-O-methyl modified nucleotide
  source 1..21: mol_type = other RNA
ctcatctgcatcaaaatactt

SEQ ID NO: 360 - DNA, 21 bp, synthetic construct
  misc_feature 1..21: note = Synthetic
  misc_feature 1..19: note = ribonucleotide unmodified or modified as described for this sequence
  misc_feature 1: note = Nucleotide linked to an inverted abasic cap
  modified_base 1..2: mod_base = OTHER; note = 2'-deoxy-2'-fluoro modified nucleotide
  modified_base 4..5: mod_base = OTHER; note = 2'-deoxy-2'-fluoro modified nucleotide
  modified_base 8: mod_base = OTHER; note = 2'-deoxy-2'-fluoro modified nucleotide
  modified_base 10..11: mod_base = OTHER; note = 2'-deoxy-2'-fluoro modified nucleotide
  modified_base 15..17: mod_base = OTHER; note = 2'-deoxy-2'-fluoro modified nucleotide
  misc_feature 21: note = Nucleotide linked to an inverted abasic cap
  source 1..21: mol_type = other DNA
  misc_feature 1..2: note = RNA
  misc_feature 3: note = DNA
  misc_feature 4..5: note = RNA
  misc_feature 6..7: note = DNA
  misc_feature 8: note = RNA
  misc_feature 9: note = DNA
  misc_feature 10..11: note = RNA
  misc_feature 12..14: note = DNA
  misc_feature 15..17: note = RNA
  misc_feature 18..21: note = DNA
ttgctgacattgaacccaatt

SEQ ID NO: 361 - RNA, 21 nt, synthetic construct
  misc_feature 1..21: note = Synthetic
  modified_base 4..5: mod_base = OTHER; note = 2'-O-methyl modified nucleotide
  modified_base 6..8: mod_base = OTHER; note = 2'-deoxy-2'-fluoro modified nucleotide
  modified_base 9..10: mod_base = OTHER; note = 2'-O-methyl modified nucleotide
  modified_base 11: mod_base = OTHER; note = 2'-deoxy-2'-fluoro modified nucleotide
  modified_base 12: mod_base = OTHER; note = 2'-O-methyl modified nucleotide
  modified_base 13..14: mod_base = OTHER; note = 2'-deoxy-2'-fluoro modified nucleotide
  modified_base 15..16: mod_base = OTHER; note = 2'-O-methyl modified nucleotide
  modified_base 17: mod_base = OTHER; note = 2'-deoxy-2'-fluoro modified nucleotide
  modified_base 18..21: mod_base = OTHER; note = 2'-O-methyl modified nucleotide
  source 1..21: mol_type = other RNA
ttgggttcaatgtcagcaatt

SEQ ID NO: 362 - DNA, 21 bp, synthetic construct
  misc_feature 1..21: note = Synthetic
  misc_feature 1..19: note = ribonucleotide unmodified or modified as described for this sequence
  misc_feature 1: note = Nucleotide linked to an inverted abasic cap
  modified_base 2: mod_base = OTHER; note = 2'-deoxy-2'-fluoro modified nucleotide
  modified_base 4: mod_base = OTHER; note = 2'-deoxy-2'-fluoro modified nucleotide
  modified_base 10..11: mod_base = OTHER; note = 2'-deoxy-2'-fluoro modified nucleotide
  modified_base 15..17: mod_base = OTHER; note = 2'-deoxy-2'-fluoro modified nucleotide
  misc_feature 21: note = Nucleotide linked to an inverted abasic cap
  source 1..21: mol_type = other DNA
  misc_feature 1: note = DNA
  misc_feature 2: note = RNA
  misc_feature 3: note = DNA
  misc_feature 4: note = RNA
  misc_feature 5..9: note = DNA
  misc_feature 10..11: note = RNA
  misc_feature 12..14: note = DNA
  misc_feature 15..17: note = RNA
  misc_feature 18..21: note = DNA
gtgtgagggttgaactcaatt

SEQ ID NO: 363 - RNA, 21 nt, synthetic construct
  misc_feature 1..21: note = Synthetic
  modified_base 4..5: mod_base = OTHER; note = 2'-O-methyl modified nucleotide
  modified_base 6..8: mod_base = OTHER; note = 2'-deoxy-2'-fluoro modified nucleotide
  modified_base 9..10: mod_base = OTHER; note = 2'-O-methyl modified nucleotide
  modified_base 11..15: mod_base = OTHER; note = 2'-deoxy-2'-fluoro modified nucleotide
  modified_base 16: mod_base = OTHER; note = 2'-O-methyl modified nucleotide
  modified_base 17: mod_base = OTHER; note = 2'-deoxy-2'-fluoro modified nucleotide
  modified_base 18: mod_base = OTHER; note = 2'-O-methyl modified nucleotide
  modified_base 19: mod_base = OTHER; note = 2'-deoxy-2'-fluoro modified nucleotide
  modified_base 20..21: mod_base = OTHER; note = 2'-O-methyl modified nucleotide
  source 1..21: mol_type = other RNA
ttgagttcaaccctcacactt

SEQ ID NO: 364 - RNA, 21 nt, synthetic construct
  misc_feature 1..21: note = Synthetic
  modified_base 5: mod_base = OTHER; note = 2'-deoxy-2'-fluoro modified nucleotide
  modified_base 7: mod_base = OTHER; note = 2'-deoxy-2'-fluoro modified nucleotide
  modified_base 9: mod_base = OTHER; note = 2'-deoxy-2'-fluoro modified nucleotide
  modified_base 11: mod_base = OTHER; note = 2'-deoxy-2'-fluoro modified nucleotide
  modified_base 13: mod_base = OTHER; note = 2'-deoxy-2'-fluoro modified nucleotide
  modified_base 16: mod_base = OTHER; note = 2'-deoxy-2'-fluoro modified nucleotide
  modified_base 18: mod_base = OTHER; note = 2'-deoxy-2'-fluoro modified nucleotide
  modified_base 20..21: mod_base = OTHER; note = 2'-O-methyl modified nucleotide
  modified_base 20..21: mod_base = OTHER; note = phosphorothioate linkage
  source 1..21: mol_type = other RNA
taatatatacatgtcacactt

SEQ ID NO: 365 - RNA, 21 nt, synthetic construct
  misc_feature 1..21: note = Synthetic
  modified_base 2: mod_base = OTHER; note = 2'-O-methyl modified nucleotide
  modified_base 7..9: mod_base = OTHER; note = 2'-O-methyl modified nucleotide
  modified_base 12: mod_base = OTHER; note = 2'-O-methyl modified nucleotide
  modified_base 15: mod_base = OTHER; note = 2'-O-methyl modified nucleotide
  modified_base 18: mod_base = OTHER; note = 2'-O-methyl modified nucleotide
  modified_base 20..21: mod_base = OTHER; note = 2'-O-methyl modified nucleotide
  modified_base 20..21: mod_base = OTHER; note = phosphorothioate linkage
  source 1..21: mol_type = other RNA
tttgggttcaatgtcagcatt

SEQ ID NO: 366 - DNA, 21 bp, synthetic construct
  misc_feature 1..21: note = Synthetic
  misc_feature 1..19: note = ribonucleotide unmodified or modified as described for this sequence
  misc_feature 1: note = Nucleotide linked to an inverted abasic cap
  modified_base 1: mod_base = OTHER; note = 2'-deoxy-2'-fluoro modified nucleotide
  modified_base 5..6: mod_base = OTHER; note = 2'-deoxy-2'-fluoro modified nucleotide
  modified_base 8: mod_base = OTHER; note = 2'-deoxy-2'-fluoro modified nucleotide
  modified_base 10: mod_base = OTHER; note = 2'-deoxy-2'-fluoro modified nucleotide
  modified_base 12: mod_base = OTHER; note = 2'-deoxy-2'-fluoro modified nucleotide
  modified_base 14..15: mod_base = OTHER; note = 2'-deoxy-2'-fluoro modified nucleotide
  modified_base 17: mod_base = OTHER; note = 2'-deoxy-2'-fluoro modified nucleotide
  modified_base 19: mod_base = OTHER; note = 2'-deoxy-2'-fluoro modified nucleotide
  misc_feature 21: note = Nucleotide linked to an inverted abasic cap
  source 1..21: mol_type = other DNA
  misc_feature 1: note = RNA
  misc_feature 2..4: note = DNA
  misc_feature 5..6: note = RNA
  misc_feature 7: note = DNA
  misc_feature 8: note = RNA
  misc_feature 9: note = DNA
  misc_feature 10: note = RNA
  misc_feature 11: note = DNA
  misc_feature 12: note = RNA
  misc_feature 13: note = DNA
  misc_feature 14..15: note = RNA
  misc_feature 16: note = DNA
  misc_feature 17: note = RNA
  misc_feature 18: note = DNA
  misc_feature 19: note = RNA
  misc_feature 20..21: note = DNA
cgggttatgtacgtcatgttt

SEQ ID NO: 367 - RNA, 21 nt, synthetic construct
  misc_feature 1..21: note = Synthetic
  modified_base 4: mod_base = OTHER; note = 2'-deoxy-2'-fluoro modified nucleotide
  modified_base 5..6: mod_base = OTHER; note = 2'-O-methyl modified nucleotide
  modified_base 7: mod_base = OTHER; note = 2'-deoxy-2'-fluoro modified nucleotide
  modified_base 8: mod_base = OTHER; note = 2'-O-methyl modified nucleotide
  modified_base 9: mod_base = OTHER; note = 2'-deoxy-2'-fluoro modified nucleotide
  modified_base 10: mod_base = OTHER; note = 2'-O-methyl modified nucleotide
  modified_base 11: mod_base = OTHER; note = 2'-deoxy-2'-fluoro modified nucleotide
  modified_base 12: mod_base = OTHER; note = 2'-O-methyl modified nucleotide
  modified_base 13: mod_base = OTHER; note = 2'-deoxy-2'-fluoro modified nucleotide
  modified_base 15: mod_base = OTHER; note = 2'-O-methyl modified nucleotide
  modified_base 16..18: mod_base = OTHER; note = 2'-deoxy-2'-fluoro modified nucleotide
  modified_base 19..21: mod_base = OTHER; note = 2'-O-methyl modified nucleotide
  source 1..21: mol_type = other RNA
acatgacgtacataacccgtt

SEQ ID NO: 368 - RNA, 21 nt, synthetic construct
  misc_feature 1..21: note = Synthetic
  modified_base 7..9: mod_base = OTHER; note = 2'-O-methyl modified nucleotide
  modified_base 12: mod_base = OTHER; note = 2'-O-methyl modified nucleotide
  modified_base 15: mod_base = OTHER; note = 2'-O-methyl modified nucleotide
  modified_base 18: mod_base = OTHER; note = 2'-O-methyl modified nucleotide
  modified_base 20..21: mod_base = OTHER; note = 2'-O-methyl modified nucleotide
  modified_base 1..2: mod_base = OTHER; note = phosphorothioate linkage
  modified_base 2..3: mod_base = OTHER; note = phosphorothioate linkage
  modified_base 20..21: mod_base = OTHER; note = phosphorothioate linkage
  source 1..21: mol_type = other RNA
tttgggttcaatgtcagcatt

SEQ ID NO: 369 - RNA, 21 nt, synthetic construct
  misc_feature 1..21: note = Synthetic
  modified_base 4..6: mod_base = OTHER; note = 2'-O-methyl modified nucleotide
  modified_base 7..9: mod_base = OTHER; note = 2'-deoxy-2'-fluoro modified nucleotide
  modified_base 10..11: mod_base = OTHER; note = 2'-O-methyl modified nucleotide
  modified_base 12: mod_base = OTHER; note = 2'-deoxy-2'-fluoro modified nucleotide
  modified_base 13: mod_base = OTHER; note = 2'-O-methyl modified nucleotide
  modified_base 14..15: mod_base = OTHER; note = 2'-deoxy-2'-fluoro modified nucleotide
  modified_base 16..17: mod_base = OTHER; note = 2'-O-methyl modified nucleotide
  modified_base 18: mod_base = OTHER; note = 2'-deoxy-2'-fluoro modified nucleotide
  modified_base 19..21: mod_base = OTHER; note = 2'-O-methyl modified nucleotide
  source 1..21: mol_type = other RNA
tttgggttcaatgtcagcatt

SEQ ID NO: 370 - DNA, 21 bp, synthetic construct
  misc_feature 1..21: note = Synthetic
  misc_feature 1..19: note = ribonucleotide unmodified or modified as described for this sequence
  misc_feature 1: note = Nucleotide linked to an inverted abasic cap
  modified_base 1: mod_base = OTHER; note = 2'-deoxy-2'-fluoro modified nucleotide
  modified_base 3..4: mod_base = OTHER; note = 2'-deoxy-2'-fluoro modified nucleotide
  modified_base 6: mod_base = OTHER; note = 2'-deoxy-2'-fluoro modified nucleotide
  modified_base 8..9: mod_base = OTHER; note = 2'-deoxy-2'-fluoro modified nucleotide
  modified_base 12: mod_base = OTHER; note = 2'-deoxy-2'-fluoro modified nucleotide
  modified_base 15..17: mod_base = OTHER; note = 2'-deoxy-2'-fluoro modified nucleotide
  misc_feature 21: note = Nucleotide linked to an inverted abasic cap
  source 1..21: mol_type = other DNA
  misc_feature 1: note = RNA
  misc_feature 2: note = DNA
  misc_feature 3..4: note = RNA
  misc_feature 5: note = DNA
  misc_feature 6: note = RNA
  misc_feature 7: note = DNA
  misc_feature 8..9: note = RNA
  misc_feature 10..11: note = DNA
  misc_feature 12: note = RNA
  misc_feature 13..14: note = DNA
  misc_feature 15..17: note = RNA
  misc_feature 18..21: note = DNA
cgtcatgttgataatccaatt

SEQ ID NO: 371 - RNA, 21 nt, synthetic construct
  misc_feature 1..21: note = Synthetic
  modified_base 4..5: mod_base = OTHER; note = 2'-O-methyl modified nucleotide
  modified_base 6..7: mod_base = OTHER; note = 2'-deoxy-2'-fluoro modified nucleotide
  modified_base 8: mod_base = OTHER; note = 2'-O-methyl modified nucleotide
  modified_base 9..10: mod_base = OTHER; note = 2'-deoxy-2'-fluoro modified nucleotide
  modified_base 11..12: mod_base = OTHER; note = 2'-O-methyl modified nucleotide
  modified_base 13: mod_base = OTHER; note = 2'-deoxy-2'-fluoro modified nucleotide
  modified_base 15: mod_base = OTHER; note = 2'-deoxy-2'-fluoro modified nucleotide
  modified_base 16..17: mod_base = OTHER; note = 2'-O-methyl modified nucleotide
  modified_base 18: mod_base = OTHER; note = 2'-deoxy-2'-fluoro modified nucleotide
  modified_base 19..21: mod_base = OTHER; note = 2'-O-methyl modified nucleotide
  source 1..21: mol_type = other RNA
ttggattatcaacatgacgtt

SEQ ID NO: 372 - DNA, 21 bp, synthetic construct
  misc_feature 1..21: note = Synthetic
  misc_feature 1..19: note = ribonucleotide unmodified or modified as described for this sequence
  misc_feature 1: note = Nucleotide linked to an inverted abasic cap
  modified_base 2: mod_base = OTHER; note = 2'-deoxy-2'-fluoro modified nucleotide
  modified_base 5..8: mod_base = OTHER; note = 2'-deoxy-2'-fluoro modified nucleotide
  modified_base 10: mod_base = OTHER; note = 2'-deoxy-2'-fluoro modified nucleotide
  modified_base 12..13: mod_base = OTHER; note = 2'-deoxy-2'-fluoro modified nucleotide
  modified_base 15: mod_base = OTHER; note = 2'-deoxy-2'-fluoro modified nucleotide
  modified_base 17: mod_base = OTHER; note = 2'-deoxy-2'-fluoro modified nucleotide
  misc_feature 21: note = Nucleotide linked to an inverted abasic cap
  source 1..21: mol_type = other DNA
  misc_feature 1: note = DNA
  misc_feature 2: note = RNA
  misc_feature 3..4: note = DNA
  misc_feature 5..8: note = RNA
  misc_feature 9: note = DNA
  misc_feature 10: note = RNA
  misc_feature 11: note = DNA
  misc_feature 12..13: note = RNA
  misc_feature 14: note = DNA
  misc_feature 15: note = RNA
  misc_feature 16: note = DNA
  misc_feature 17: note = RNA
  misc_feature 18..21: note = DNA
gtgactttgtactgcatgatt

SEQ ID NO: 373 - RNA, 21 nt, synthetic construct
  misc_feature 1..21: note = Synthetic
  modified_base 4: mod_base = OTHER; note = 2'-deoxy-2'-fluoro modified nucleotide
  modified_base 5: mod_base = OTHER; note = 2'-O-methyl modified nucleotide
  modified_base 6: mod_base = OTHER; note = 2'-deoxy-2'-fluoro modified nucleotide
  modified_base 7..8: mod_base = OTHER; note = 2'-O-methyl modified nucleotide
  modified_base 9: mod_base = OTHER; note = 2'-deoxy-2'-fluoro modified nucleotide
  modified_base 10: mod_base = OTHER; note = 2'-O-methyl modified nucleotide
  modified_base 11: mod_base = OTHER; note = 2'-deoxy-2'-fluoro modified nucleotide
  modified_base 12..13: mod_base = OTHER; note = 2'-O-methyl modified nucleotide
  modified_base 15: mod_base = OTHER; note = 2'-O-methyl modified nucleotide
  modified_base 16..17: mod_base = OTHER; note = 2'-deoxy-2'-fluoro modified nucleotide
  modified_base 18: mod_base = OTHER; note = 2'-O-methyl modified nucleotide
  modified_base 19: mod_base = OTHER; note = 2'-deoxy-2'-fluoro modified nucleotide
  modified_base 20..21: mod_base = OTHER; note = 2'-O-methyl modified nucleotide
  source 1..21: mol_type = other RNA
tcatgcagtacaaagtcactt

SEQ ID NO: 374 - DNA, 21 bp, synthetic construct
  misc_feature 1..21: note = Synthetic
  misc_feature 1..19: note = ribonucleotide unmodified or modified as described for this sequence
  misc_feature 1: note = Nucleotide linked to an inverted abasic cap
  modified_base 5: mod_base = OTHER; note = 2'-deoxy-2'-fluoro modified nucleotide
  modified_base 9: mod_base = OTHER; note = 2'-deoxy-2'-fluoro modified nucleotide
  modified_base 15: mod_base = OTHER; note = 2'-deoxy-2'-fluoro modified nucleotide
  modified_base 17: mod_base = OTHER; note = 2'-deoxy-2'-fluoro modified nucleotide
  modified_base 19: mod_base = OTHER; note = 2'-deoxy-2'-fluoro modified nucleotide
  misc_feature 21: note = Nucleotide linked to an inverted abasic cap
  source 1..21: mol_type = other DNA
  misc_feature 1..4: note = DNA
  misc_feature 5: note = RNA
  misc_feature 6..8: note = DNA
  misc_feature 9: note = RNA
  misc_feature 10..14: note = DNA
  misc_feature 15: note = RNA
  misc_feature 16: note = DNA
  misc_feature 17: note = RNA
  misc_feature 18: note = DNA
  misc_feature 19: note = RNA
  misc_feature 20..21: note = DNA
aaggtaagtggaggtatactt

SEQ ID NO: 375 - RNA, 21 nt, synthetic construct
  misc_feature 1..21: note = Synthetic
  modified_base 4: mod_base = OTHER; note = 2'-deoxy-2'-fluoro modified nucleotide
  modified_base 5: mod_base = OTHER; note = 2'-O-methyl modified nucleotide
  modified_base 6..10: mod_base = OTHER; note = 2'-deoxy-2'-fluoro modified nucleotide
  modified_base 11: mod_base = OTHER; note = 2'-O-methyl modified nucleotide
  modified_base 12..14: mod_base = OTHER; note = 2'-deoxy-2'-fluoro modified nucleotide
  modified_base 15: mod_base = OTHER; note = 2'-O-methyl modified nucleotide
  modified_base 16..19: mod_base = OTHER; note = 2'-deoxy-2'-fluoro modified nucleotide
  modified_base 20..21: mod_base = OTHER; note = 2'-O-methyl modified nucleotide
  source 1..21: mol_type = other RNA
gtatacctccacttacctttt

SEQ ID NO: 376 - RNA, 21 nt, synthetic construct
  misc_feature 1..21: note = Synthetic
  modified_base 4: mod_base = OTHER; note = 2'-O-methyl modified nucleotide
  modified_base 6: mod_base = OTHER; note = 2'-O-methyl modified nucleotide
  modified_base 8: mod_base = OTHER; note = 2'-O-methyl modified nucleotide
  modified_base 10: mod_base = OTHER; note = 2'-O-methyl modified nucleotide
  modified_base 13: mod_base = OTHER; note = 2'-O-methyl modified nucleotide
  modified_base 15: mod_base = OTHER; note = 2'-O-methyl modified nucleotide
  modified_base 17: mod_base = OTHER; note = 2'-O-methyl modified nucleotide
  modified_base 20..21: mod_base = OTHER; note = 2'-O-methyl modified nucleotide
  modified_base 20..21: mod_base = OTHER; note = phosphorothioate linkage
  source 1..21: mol_type = other RNA
tatatacatgtcacacatctt

SEQ ID NO: 377 - DNA, 21 bp, synthetic construct
  misc_feature 1..21: note = Synthetic
  misc_feature 1..19: note = ribonucleotide unmodified or modified as described for this sequence
  misc_feature 1: note = Nucleotide linked to an inverted abasic cap
  modified_base 2..3: mod_base = OTHER; note = 2'-deoxy-2'-fluoro modified nucleotide
  modified_base 5: mod_base = OTHER; note = 2'-deoxy-2'-fluoro modified nucleotide
  modified_base 10: mod_base = OTHER; note = 2'-deoxy-2'-fluoro modified nucleotide
  modified_base 12: mod_base = OTHER; note = 2'-deoxy-2'-fluoro modified nucleotide
  modified_base 14: mod_base = OTHER; note = 2'-deoxy-2'-fluoro modified nucleotide
  modified_base 17: mod_base = OTHER; note = 2'-deoxy-2'-fluoro modified nucleotide
  misc_feature 21: note = Nucleotide linked to an inverted abasic cap
  source 1..21: mol_type = other DNA
  misc_feature 1: note = DNA
  misc_feature 2..3: note = RNA
  misc_feature 4: note = DNA
  misc_feature 5: note = RNA
  misc_feature 6..9: note = DNA
  misc_feature 10: note = RNA
  misc_feature 11: note = DNA
  misc_feature 12: note = RNA
  misc_feature 13: note = DNA
  misc_feature 14: note = RNA
  misc_feature 15..16: note = DNA
  misc_feature 17: note = RNA
  misc_feature 18..21: note = DNA
gctacaaggtacgcaataatt

SEQ ID NO: 378 - RNA, 21 nt, synthetic construct
  misc_feature 1..21: note = Synthetic
  modified_base 4..5: mod_base = OTHER; note = 2'-deoxy-2'-fluoro modified nucleotide
  modified_base 6: mod_base = OTHER; note = 2'-O-methyl modified nucleotide
  modified_base 7: mod_base = OTHER; note = 2'-deoxy-2'-fluoro modified nucleotide
  modified_base 8: mod_base = OTHER; note = 2'-O-methyl modified nucleotide
  modified_base 9: mod_base = OTHER; note = 2'-deoxy-2'-fluoro modified nucleotide
  modified_base 10: mod_base = OTHER; note = 2'-O-methyl modified nucleotide
  modified_base 11..14: mod_base = OTHER; note = 2'-deoxy-2'-fluoro modified nucleotide
  modified_base 15: mod_base = OTHER; note = 2'-O-methyl modified nucleotide
  modified_base 16: mod_base = OTHER; note = 2'-deoxy-2'-fluoro modified nucleotide
  modified_base 17..18: mod_base = OTHER; note = 2'-O-methyl modified nucleotide
  modified_base 19: mod_base = OTHER; note = 2'-deoxy-2'-fluoro modified nucleotide
  modified_base 20..21: mod_base = OTHER; note = 2'-O-methyl modified nucleotide
  source 1..21: mol_type = other RNA
ttattgcgtaccttgtagctt

SEQ ID NO: 379 - RNA, 21 nt, synthetic construct
  misc_feature 1..21: note = Synthetic
  modified_base 4..5: mod_base = OTHER; note = 2'-O-methyl modified nucleotide
  modified_base 6: mod_base = OTHER; note = 2'-deoxy-2'-fluoro modified nucleotide
  modified_base 7: mod_base = OTHER; note = 2'-O-methyl modified nucleotide
  modified_base 8: mod_base = OTHER; note = 2'-deoxy-2'-fluoro modified nucleotide
  modified_base 9: mod_base = OTHER; note = 2'-O-methyl modified nucleotide
  modified_base 10: mod_base = OTHER; note = 2'-deoxy-2'-fluoro modified nucleotide
  modified_base 11..16: mod_base = OTHER; note = 2'-O-methyl modified nucleotide
  modified_base 17: mod_base = OTHER; note = 2'-deoxy-2'-fluoro modified nucleotide
  modified_base 18..21: mod_base = OTHER; note = 2'-O-methyl modified nucleotide
  modified_base 20..21: mod_base = OTHER; note = phosphorothioate linkage
  source 1..21: mol_type = other RNA
atgtcacacatcttccatctt

SEQ ID NO: 380 - DNA, 21 bp, synthetic construct
  misc_feature 1..21: note = Synthetic
  misc_feature 1..19: note = ribonucleotide unmodified or modified as described for this sequence
  misc_feature 1: note = Nucleotide linked to an inverted abasic cap
  modified_base 5: mod_base = OTHER; note = 2'-deoxy-2'-fluoro modified nucleotide
  modified_base 7: mod_base = OTHER; note = 2'-deoxy-2'-fluoro modified nucleotide
  modified_base 13..14: mod_base = OTHER; note = 2'-deoxy-2'-fluoro modified nucleotide
  modified_base 18..19: mod_base = OTHER; note = 2'-deoxy-2'-fluoro modified nucleotide
  misc_feature 21: note = Nucleotide linked to an inverted abasic cap
  source 1..21: mol_type = other DNA
  misc_feature 1..4: note = DNA
  misc_feature 5: note = RNA
  misc_feature 6: note = DNA
  misc_feature 7: note = RNA
  misc_feature 8..12: note = DNA
  misc_feature 13..14: note = RNA
  misc_feature 15..17: note = DNA
  misc_feature 18..19: note = RNA
  misc_feature 20..21: note = DNA
aaggtgtgagggttgaacttt

SEQ ID NO: 381 - RNA, 21 nt, synthetic construct
  misc_feature 1..21: note = Synthetic
  modified_base 4..5: mod_base = OTHER; note = 2'-deoxy-2'-fluoro modified nucleotide
  modified_base 6..7: mod_base = OTHER; note = 2'-O-methyl modified nucleotide
  modified_base 8..12: mod_base = OTHER; note = 2'-deoxy-2'-fluoro modified nucleotide
  modified_base 13: mod_base = OTHER; note = 2'-O-methyl modified nucleotide
  modified_base 14: mod_base = OTHER; note = 2'-deoxy-2'-fluoro modified nucleotide
  modified_base 15: mod_base = OTHER; note = 2'-O-methyl modified nucleotide
  modified_base 16..19: mod_base = OTHER; note = 2'-deoxy-2'-fluoro modified nucleotide
  modified_base 20..21: mod_base = OTHER; note = 2'-O-methyl modified nucleotide
  source 1..21: mol_type = other RNA
agttcaaccctcacacctttt

SEQ ID NO: 382 - DNA, 21 bp, synthetic construct
  misc_feature 1..21: note = Synthetic
  misc_feature 1..19: note = ribonucleotide unmodified or modified as described for this sequence
  misc_feature 1: note = Nucleotide linked to an inverted abasic cap
  modified_base 1: mod_base = OTHER; note = 2'-deoxy-2'-fluoro modified nucleotide
  modified_base 5..7: mod_base = OTHER; note = 2'-deoxy-2'-fluoro modified nucleotide
  modified_base 11..13: mod_base = OTHER; note = 2'-deoxy-2'-fluoro modified nucleotide
  modified_base 18: mod_base = OTHER; note = 2'-deoxy-2'-fluoro modified nucleotide
  misc_feature 21: note = Nucleotide linked to an inverted abasic cap
  source 1..21: mol_type = other DNA
  misc_feature 1: note = RNA
  misc_feature 2..4: note = DNA
  misc_feature 5..7: note = RNA
  misc_feature 8..10: note = DNA
  misc_feature 11..13: note = RNA
  misc_feature 14..17: note = DNA
  misc_feature 18: note = RNA
  misc_feature 19..21: note = DNA
caagtttgaatttgggatatt

SEQ ID NO: 383 - RNA, 21 nt, synthetic construct
  misc_feature 1..21: note = Synthetic
  modified_base 4..6: mod_base = OTHER; note = 2'-deoxy-2'-fluoro modified nucleotide
  modified_base 7..9: mod_base = OTHER; note = 2'-O-methyl modified nucleotide
  modified_base 10..12: mod_base = OTHER; note = 2'-deoxy-2'-fluoro modified nucleotide
  modified_base 13: mod_base = OTHER; note = 2'-O-methyl modified nucleotide
  modified_base 15: mod_base = OTHER; note = 2'-O-methyl modified nucleotide
  modified_base 16..18: mod_base = OTHER; note = 2'-deoxy-2'-fluoro modified nucleotide
  modified_base 19..21: mod_base = OTHER; note = 2'-O-methyl modified nucleotide
  source 1..21: mol_type = other RNA
tatcccaaattcaaacttgtt

SEQ ID NO: 384 - RNA, 21 nt, synthetic construct
  misc_feature 1..21: note = Synthetic
  modified_base 4..5: mod_base = OTHER; note = 2'-O-methyl modified nucleotide
  modified_base 7: mod_base = OTHER; note = 2'-O-methyl modified nucleotide
  modified_base 13: mod_base = OTHER; note = 2'-O-methyl modified nucleotide
  modified_base 16: mod_base = OTHER; note = 2'-O-methyl modified nucleotide
  modified_base 19..21: mod_base = OTHER; note = 2'-O-methyl modified nucleotide
  modified_base 2..3: mod_base = OTHER; note = phosphorothioate linkage
  modified_base 3..4: mod_base = OTHER; note = phosphorothioate linkage
  modified_base 20..21: mod_base = OTHER; note = phosphorothioate linkage
  source 1..21: mol_type = other RNA
acttcatgagggttgcgactt

SEQ ID NO: 385 - RNA, 21 nt, synthetic construct
  misc_feature 1..21: note = Synthetic
  modified_base 4: mod_base = OTHER; note = 2'-deoxy-2'-fluoro modified nucleotide
  modified_base 5: mod_base = OTHER; note = 2'-O-methyl modified nucleotide
  modified_base 6: mod_base = OTHER; note = 2'-deoxy-2'-fluoro modified nucleotide
  modified_base 7: mod_base = OTHER; note = 2'-O-methyl modified nucleotide
  modified_base 8: mod_base = OTHER; note = 2'-deoxy-2'-fluoro modified nucleotide
  modified_base 9: mod_base = OTHER; note = 2'-O-methyl modified nucleotide
  modified_base 10: mod_base = OTHER; note = 2'-deoxy-2'-fluoro modified nucleotide
  modified_base 11..12: mod_base = OTHER; note = 2'-O-methyl modified nucleotide
  modified_base 13: mod_base = OTHER; note = 2'-deoxy-2'-fluoro modified nucleotide
  modified_base 14: mod_base = OTHER; note = 2'-O-methyl modified nucleotide
  modified_base 15: mod_base = OTHER; note = 2'-deoxy-2'-fluoro modified nucleotide
  modified_base 16: mod_base = OTHER; note = 2'-O-methyl modified nucleotide
  modified_base 17: mod_base = OTHER; note = 2'-deoxy-2'-fluoro modified nucleotide
  modified_base 18..21: mod_base = OTHER; note = 2'-O-methyl modified nucleotide
  modified_base 20..21: mod_base = OTHER; note = phosphorothioate linkage
  source 1..21: mol_type = other RNA
tatatacatgtcacacatctt

SEQ ID NO: 386 - RNA, 21 nt, synthetic construct
  misc_feature 1..21: note = Synthetic
  modified_base 7..9: mod_base = OTHER; note = 2'-O-methyl modified nucleotide
  modified_base 12: mod_base = OTHER; note = 2'-O-methyl modified nucleotide
  modified_base 15: mod_base = OTHER; note = 2'-O-methyl modified nucleotide
  modified_base 18: mod_base = OTHER; note = 2'-O-methyl modified nucleotide
  modified_base 20..21: mod_base = OTHER; note = 2'-O-methyl modified nucleotide
  modified_base 1..2: mod_base = OTHER; note = phosphorothioate linkage
  modified_base 3..4: mod_base = OTHER; note = phosphorothioate linkage
  modified_base 20..21: mod_base = OTHER; note = phosphorothioate linkage
  source 1..21: mol_type = other RNA
tttgggttcaatgtcagcatt

SEQ ID NO: 387 - DNA, 21 bp, synthetic construct
  misc_feature 1..21: note = Synthetic
  misc_feature 1..19: note = ribonucleotide unmodified or modified as described for this sequence
  misc_feature 1: note = Nucleotide linked to an inverted abasic cap
  modified_base 2: mod_base = OTHER; note = 2'-deoxy-2'-fluoro modified nucleotide
  modified_base 5..9: mod_base = OTHER; note = 2'-deoxy-2'-fluoro modified nucleotide
  modified_base 11: mod_base = OTHER; note = 2'-deoxy-2'-fluoro modified nucleotide
  modified_base 16: mod_base = OTHER; note = 2'-deoxy-2'-fluoro modified nucleotide
  modified_base 18: mod_base = OTHER; note = 2'-deoxy-2'-fluoro modified nucleotide
  misc_feature 21: note = Nucleotide linked to an inverted abasic cap
  source 1..21: mol_type = other DNA
  misc_feature 1: note = DNA
  misc_feature 2: note = RNA
  misc_feature 3..4: note = DNA
  misc_feature 5..9: note = RNA
  misc_feature 10: note = DNA
  misc_feature 11: note = RNA
  misc_feature 12..15: note = DNA
  misc_feature 16: note = RNA
  misc_feature 17: note = DNA
  misc_feature 18: note = RNA
  misc_feature 19..21: note = DNA
gcaaccctcatgaagtacatt

SEQ ID NO: 388 - RNA, 21 nt, synthetic construct
  misc_feature 1..21: note = Synthetic
  modified_base 4: mod_base = OTHER; note = 2'-O-methyl modified nucleotide
  modified_base 5..8: mod_base = OTHER; note = 2'-deoxy-2'-fluoro modified nucleotide
  modified_base 9: mod_base = OTHER; note = 2'-O-methyl modified nucleotide
  modified_base 10: mod_base = OTHER; note = 2'-deoxy-2'-fluoro modified nucleotide
  modified_base 11..13: mod_base = OTHER; note = 2'-O-methyl modified nucleotide
  modified_base 15: mod_base = OTHER; note = 2'-O-methyl modified nucleotide
  modified_base 16..17: mod_base = OTHER; note = 2'-deoxy-2'-fluoro modified nucleotide
  modified_base 18: mod_base = OTHER; note = 2'-O-methyl modified nucleotide
  modified_base 19: mod_base = OTHER; note = 2'-deoxy-2'-fluoro modified nucleotide
  modified_base 20..21: mod_base = OTHER; note = 2'-O-methyl modified nucleotide
  source 1..21: mol_type = other RNA
tgtacttcatgagggttgctt

SEQ ID NO: 389 - RNA, 21 nt, synthetic construct
  misc_feature 1..21: note = Synthetic
  modified_base 4..5: mod_base = OTHER; note = 2'-O-methyl modified nucleotide
  modified_base 7: mod_base = OTHER; note = 2'-O-methyl modified nucleotide
  modified_base 13: mod_base = OTHER; note = 2'-O-methyl modified nucleotide
  modified_base 16: mod_base = OTHER; note = 2'-O-methyl modified nucleotide
  modified_base 19..21: mod_base = OTHER; note = 2'-O-methyl modified nucleotide
  modified_base 1..2: mod_base = OTHER; note = phosphorothioate linkage
  modified_base 3..4: mod_base = OTHER; note = phosphorothioate linkage
  modified_base 20..21: mod_base = OTHER; note = phosphorothioate linkage
  source 1..21: mol_type = other RNA
acttcatgagggttgcgactt

SEQ ID NO: 390 - RNA, 21 nt, synthetic construct
  misc_feature 1..21: note = Synthetic
  modified_base 6: mod_base = OTHER; note = 2'-deoxy-2'-fluoro modified nucleotide
  modified_base 10..12: mod_base = OTHER; note = 2'-deoxy-2'-fluoro modified nucleotide
  modified_base 15: mod_base = OTHER; note = 2'-deoxy-2'-fluoro modified nucleotide
  modified_base 18..19: mod_base = OTHER; note = 2'-deoxy-2'-fluoro modified nucleotide
  modified_base 20..21: mod_base = OTHER; note = 2'-O-methyl modified nucleotide
  modified_base 20..21: mod_base = OTHER; note = phosphorothioate linkage
  source 1..21: mol_type = other RNA
tctccatttggattatcaatt

SEQ ID NO: 391 - DNA, 21 bp, synthetic construct
  misc_feature 1..21: note = Synthetic
  misc_feature 1..19: note = ribonucleotide unmodified or modified as described for this sequence
  misc_feature 1: note = Nucleotide linked to an inverted abasic cap
  modified_base 3..5: mod_base = OTHER; note = 2'-deoxy-2'-fluoro modified nucleotide
  modified_base 9..11: mod_base = OTHER; note = 2'-deoxy-2'-fluoro modified nucleotide
  modified_base 14: mod_base = OTHER; note = 2'-deoxy-2'-fluoro modified nucleotide
  modified_base 18..19: mod_base = OTHER; note = 2'-deoxy-2'-fluoro modified nucleotide
  misc_feature 21: note = Nucleotide linked to an inverted abasic cap
  source 1..21: mol_type = other DNA
  misc_feature 1..2: note = DNA
  misc_feature 3..5: note = RNA
  misc_feature 6..8: note = DNA
  misc_feature 9..11: note = RNA
  misc_feature 12..13: note = DNA
  misc_feature 14: note = RNA
  misc_feature 15..17: note = DNA
  misc_feature 18..19: note = RNA
  misc_feature 20..21: note = DNA
aacccaaatttgatagacttt

SEQ ID NO: 392 - RNA, 21 nt, synthetic construct
  misc_feature 1..21: note = Synthetic
  modified_base 4..5: mod_base = OTHER; note = 2'-deoxy-2'-fluoro modified nucleotide
  modified_base 6: mod_base = OTHER; note = 2'-O-methyl modified nucleotide
  modified_base 7..8: mod_base = OTHER; note = 2'-deoxy-2'-fluoro modified nucleotide
  modified_base 9..11: mod_base = OTHER; note = 2'-O-methyl modified nucleotide
  modified_base 12..14: mod_base = OTHER; note = 2'-deoxy-2'-fluoro modified nucleotide
  modified_base 15..17: mod_base = OTHER; note = 2'-O-methyl modified nucleotide
  modified_base 18..19: mod_base = OTHER; note = 2'-deoxy-2'-fluoro modified nucleotide
  modified_base 20..21: mod_base = OTHER; note = 2'-O-methyl modified nucleotide
  source 1..21: mol_type = other RNA
agtctatcaaatttgggtttt

SEQ ID NO: 393 - DNA, 21 bp, synthetic construct
  misc_feature 1..21: note = Synthetic
  misc_feature 1..19: note = ribonucleotide unmodified or modified as described for this sequence
  misc_feature 1: note = Nucleotide linked to an inverted abasic cap
  modified_base 1: mod_base = OTHER; note = 2'-deoxy-2'-fluoro modified nucleotide
  modified_base 3: mod_base = OTHER; note = 2'-deoxy-2'-fluoro modified nucleotide
  modified_base 6: mod_base = OTHER; note = 2'-deoxy-2'-fluoro modified nucleotide
  modified_base 9..10: mod_base = OTHER; note = 2'-deoxy-2'-fluoro modified nucleotide
  modified_base 12..14: mod_base = OTHER; note = 2'-deoxy-2'-fluoro modified nucleotide
  modified_base 17: mod_base = OTHER; note = 2'-deoxy-2'-fluoro modified nucleotide
  modified_base 19: mod_base = OTHER; note = 2'-deoxy-2'-fluoro modified nucleotide
  misc_feature 21: note = Nucleotide linked to an inverted abasic cap
  source 1..21: mol_type = other DNA
  misc_feature 1: note = RNA
  misc_feature 2: note = DNA
  misc_feature 3: note = RNA
  misc_feature 4..5: note = DNA
  misc_feature 6: note = RNA
  misc_feature 7..8: note = DNA
  misc_feature 9..10: note = RNA
  misc_feature 11: note = DNA
  misc_feature 12..14: note = RNA
  misc_feature 15..16: note = DNA
  misc_feature 17: note = RNA
  misc_feature 18: note = DNA
  misc_feature 19: note = RNA
  misc_feature 20..21: note = DNA
cgcaataactgtttggtattt

SEQ ID NO: 394 - RNA, 21 nt, synthetic construct
  misc_feature 1..21: note = Synthetic
  modified_base 4..5: mod_base = OTHER; note = 2'-deoxy-2'-fluoro modified nucleotide
  modified_base 6..8: mod_base = OTHER; note = 2'-O-methyl modified nucleotide
  modified_base 9: mod_base = OTHER; note = 2'-deoxy-2'-fluoro modified nucleotide
  modified_base 10..11: mod_base = OTHER; note = 2'-O-methyl modified nucleotide
  modified_base 12..13: mod_base = OTHER; note = 2'-deoxy-2'-fluoro modified nucleotide
  modified_base 15..16: mod_base = OTHER; note = 2'-deoxy-2'-fluoro modified nucleotide
  modified_base 17: mod_base = OTHER; note = 2'-O-methyl modified nucleotide
  modified_base 18: mod_base = OTHER; note = 2'-deoxy-2'-fluoro modified nucleotide
  modified_base 19..21: mod_base = OTHER; note = 2'-O-methyl modified nucleotide
  source 1..21: mol_type = other RNA
ataccaaacagttattgcgtt

SEQ ID NO: 395 - DNA, 21 bp, synthetic construct
  misc_feature 1..21: note = Synthetic
  misc_feature 1..19: note = ribonucleotide unmodified or modified as described for this sequence
  misc_feature 1: note = Nucleotide linked to an inverted abasic cap
  modified_base 3: mod_base = OTHER; note = 2'-deoxy-2'-fluoro modified nucleotide
  modified_base 11: mod_base = OTHER; note = 2'-deoxy-2'-fluoro modified nucleotide
  modified_base 13: mod_base = OTHER; note = 2'-deoxy-2'-fluoro modified nucleotide
  modified_base 17..18: mod_base = OTHER; note = 2'-deoxy-2'-fluoro modified nucleotide
  misc_feature 21: note = Nucleotide linked to an inverted abasic cap
  source 1..21: mol_type = other DNA
  misc_feature 1..2: note = DNA
  misc_feature 3: note = RNA
  misc_feature 4..10: note = DNA
  misc_feature 11: note = RNA
  misc_feature 12: note = DNA
  misc_feature 13: note = RNA
  misc_feature 14..16: note = DNA
  misc_feature 17..18: note = RNA
  misc_feature 19..21: note = DNA
gatgagagagcacgagctatt

SEQ ID NO: 396 - RNA, 21 nt, synthetic construct
  misc_feature 1..21: note = Synthetic
  modified_base 4..6: mod_base = OTHER; note = 2'-deoxy-2'-fluoro modified nucleotide
  modified_base 7: mod_base = OTHER; note = 2'-O-methyl modified nucleotide
  modified_base 8: mod_base = OTHER; note = 2'-deoxy-2'-fluoro modified nucleotide
  modified_base 9: mod_base = OTHER; note = 2'-O-methyl modified nucleotide
  modified_base 10..16: mod_base = OTHER; note = 2'-deoxy-2'-fluoro modified nucleotide
  modified_base 17: mod_base = OTHER; note = 2'-O-methyl modified nucleotide
  modified_base 18..19: mod_base = OTHER; note = 2'-deoxy-2'-fluoro modified nucleotide
  modified_base 20..21: mod_base = OTHER; note = 2'-O-methyl modified nucleotide
  source 1..21: mol_type = other RNA
tagctcgtgctctctcatctt

SEQ ID NO: 397 - DNA, 21 bp, synthetic construct
  misc_feature 1..21: note = Synthetic
  misc_feature 1..19: note = ribonucleotide unmodified or modified as described for this sequence
  misc_feature 1: note = Nucleotide linked to an inverted abasic cap
  modified_base 1..2: mod_base = OTHER; note = 2'-deoxy-2'-fluoro modified nucleotide
  modified_base 4: mod_base = OTHER; note = 2'-deoxy-2'-fluoro modified nucleotide
  modified_base 6: mod_base = OTHER; note = 2'-deoxy-2'-fluoro modified nucleotide
  modified_base 8: mod_base = OTHER; note = 2'-deoxy-2'-fluoro modified nucleotide
  modified_base 10..11: mod_base = OTHER; note = 2'-deoxy-2'-fluoro modified nucleotide
  modified_base 13: mod_base = OTHER; note = 2'-deoxy-2'-fluoro modified nucleotide
  modified_base 15..16: mod_base = OTHER; note = 2'-deoxy-2'-fluoro modified nucleotide
  modified_base 19: mod_base = OTHER; note = 2'-deoxy-2'-fluoro modified nucleotide
  misc_feature 21: note = Nucleotide linked to an inverted abasic cap
  source 1..21: mol_type = other DNA
  misc_feature 1..2: note = RNA
  misc_feature 3: note = DNA
  misc_feature 4: note = RNA
  misc_feature 5: note = DNA
  misc_feature 6: note = RNA
  misc_feature 7: note = DNA
  misc_feature 8: note = RNA
  misc_feature 9: note = DNA
  misc_feature 10..11: note = RNA
  misc_feature 12: note = DNA
  misc_feature 13: note = RNA
  misc_feature 14: note = DNA
  misc_feature 15..16: note = RNA
  misc_feature 17..18: note = DNA
  misc_feature 19: note = RNA
  misc_feature 20..21: note = DNA
ttatgtacgtcatgttgattt

SEQ ID NO: 398 - RNA, 21 nt, synthetic construct
  misc_feature 1..21: note = Synthetic
  modified_base 4..5: mod_base = OTHER; note = 2'-O-methyl modified nucleotide
  modified_base 6: mod_base = OTHER; note = 2'-deoxy-2'-fluoro modified nucleotide
  modified_base 7: mod_base = OTHER; note = 2'-O-methyl modified nucleotide
  modified_base 8: mod_base = OTHER; note = 2'-deoxy-2'-fluoro modified nucleotide
  modified_base 9..10: mod_base = OTHER; note = 2'-O-methyl modified nucleotide
  modified_base 11: mod_base = OTHER; note = 2'-deoxy-2'-fluoro modified nucleotide
  modified_base 12: mod_base = OTHER; note = 2'-O-methyl modified nucleotide
  modified_base 13: mod_base = OTHER; note = 2'-deoxy-2'-fluoro modified nucleotide
  modified_base 15: mod_base = OTHER; note = 2'-deoxy-2'-fluoro modified nucleotide
  modified_base 16: mod_base = OTHER; note = 2'-O-methyl modified nucleotide
  modified_base 17: mod_base = OTHER; note = 2'-deoxy-2'-fluoro modified nucleotide
  modified_base 18..21: mod_base = OTHER; note = 2'-O-methyl modified nucleotide
  source 1..21: mol_type = other RNA
atcaacatgacgtacataatt

SEQ ID NO: 399 - RNA, 21 nt, synthetic construct
  misc_feature 1..21: note = Synthetic
  misc_feature 1: note = Nucleotide linked to an inverted abasic cap
  modified_base 1..2: mod_base = OTHER; note = 2'-O-methyl modified nucleotide
  modified_base 3: mod_base = OTHER; note = 2'-deoxy-2'-fluoro modified nucleotide
  modified_base 4: mod_base = OTHER; note = 2'-O-methyl modified nucleotide
  modified_base 5: mod_base = OTHER; note = 2'-deoxy-2'-fluoro modified nucleotide
  modified_base 6: mod_base = OTHER; note = 2'-O-methyl modified nucleotide
  modified_base 7: mod_base = OTHER; note = 2'-deoxy-2'-fluoro modified nucleotide
  modified_base 8..9: mod_base = OTHER; note = 2'-O-methyl modified nucleotide
  modified_base 10: mod_base = OTHER; note = 2'-deoxy-2'-fluoro modified nucleotide
  modified_base 11: mod_base = OTHER; note = 2'-O-methyl modified nucleotide
  modified_base 12: mod_base = OTHER; note = 2'-deoxy-2'-fluoro modified nucleotide
  modified_base 13: mod_base = OTHER; note = 2'-O-methyl modified nucleotide
  modified_base 14: mod_base = OTHER; note = 2'-deoxy-2'-fluoro modified nucleotide
  modified_base 15: mod_base = OTHER; note = 2'-O-methyl modified nucleotide
  modified_base 16: mod_base = OTHER; note = 2'-deoxy-2'-fluoro modified nucleotide
  modified_base 17: mod_base = OTHER; note = 2'-O-methyl modified nucleotide
  modified_base 18: mod_base = OTHER; note = 2'-deoxy-2'-fluoro modified nucleotide
  modified_base 19..21: mod_base = OTHER; note = 2'-O-methyl modified nucleotide
  modified_base 20..21: mod_base = OTHER; note = phosphorothioate linkage
  misc_feature 21: note = Nucleotide linked to an inverted abasic cap
  source 1..21: mol_type = other RNA
gatgtgtgacatgtatatatt

SEQ ID NO: 400 - DNA, 21 bp, synthetic construct
  misc_feature 1..21: note = Synthetic
  misc_feature 1..19: note = ribonucleotide unmodified or modified as described for this sequence
  misc_feature 1: note = Nucleotide linked to an inverted abasic cap
  modified_base 6: mod_base = OTHER; note = 2'-deoxy-2'-fluoro modified nucleotide
  modified_base 8: mod_base = OTHER; note = 2'-deoxy-2'-fluoro modified nucleotide
  modified_base 12..13: mod_base = OTHER; note = 2'-deoxy-2'-fluoro modified nucleotide
  modified_base 18: mod_base = OTHER; note = 2'-deoxy-2'-fluoro modified nucleotide
  misc_feature 21: note = Nucleotide linked to an inverted abasic cap
  source 1..21: mol_type = other DNA
  misc_feature 1..5: note = DNA
  misc_feature 6: note = RNA
  misc_feature 7: note = DNA
  misc_feature 8: note = RNA
  misc_feature 9..11: note = DNA
  misc_feature 12..13: note = RNA
  misc_feature 14..17: note = DNA
  misc_feature 18: note = RNA
  misc_feature 19..21: note = DNA
gagagcacgagctaaagtatt

SEQ ID NO: 401 - RNA, 21 nt, synthetic construct
  misc_feature 1..21: note = Synthetic
  modified_base 4..6: mod_base = OTHER; note = 2'-deoxy-2'-fluoro modified nucleotide
  modified_base 7..8: mod_base = OTHER; note = 2'-O-methyl modified nucleotide
  modified_base 9..11: mod_base = OTHER; note = 2'-deoxy-2'-fluoro modified nucleotide
  modified_base 12: mod_base = OTHER; note = 2'-O-methyl modified nucleotide
  modified_base 13: mod_base = OTHER; note = 2'-deoxy-2'-fluoro modified nucleotide
  modified_base 15..19: mod_base = OTHER; note = 2'-deoxy-2'-fluoro modified nucleotide
  modified_base 20..21: mod_base = OTHER; note = 2'-O-methyl modified nucleotide
  source 1..21: mol_type = other RNA
tactttagctcgtgctctctt

SEQ ID NO: 402 - DNA, 21 bp, synthetic construct
  misc_feature 1..21: note = Synthetic
  misc_feature 1..19: note = ribonucleotide unmodified or modified as described for this sequence
  misc_feature 1: note = Nucleotide linked to an inverted abasic cap
  modified_base 1: mod_base = OTHER; note = 2'-deoxy-2'-fluoro modified nucleotide
  modified_base 3..4: mod_base = OTHER; note = 2'-deoxy-2'-fluoro modified nucleotide
  modified_base 7: mod_base = OTHER; note = 2'-deoxy-2'-fluoro modified nucleotide
  modified_base 9..10: mod_base = OTHER; note = 2'-deoxy-2'-fluoro modified nucleotide
  modified_base 14..16: mod_base = OTHER; note = 2'-deoxy-2'-fluoro modified nucleotide
  misc_feature 21: note = Nucleotide linked to an inverted abasic cap
  source 1..21: mol_type = other DNA
  misc_feature 1: note = RNA
  misc_feature 2: note = DNA
  misc_feature 3..4: note = RNA
  misc_feature 5..6: note = DNA
  misc_feature 7: note = RNA
  misc_feature 8: note = DNA
  misc_feature 9..10: note = RNA
  misc_feature 11..13: note = DNA
  misc_feature 14..16: note = RNA
  misc_feature 17..21: note = DNA
tgctgacattgaacccaaatt

SEQ ID NO: 403 - DNA, 21 bp, synthetic construct
  misc_feature 1..21: note = Synthetic
  misc_feature 1..19: note = ribonucleotide unmodified or modified as described for this sequence
  misc_feature 1: note = Nucleotide linked to an inverted abasic cap
  modified_base 1..3: mod_base = OTHER; note = 2'-deoxy-2'-fluoro modified nucleotide
  modified_base 5: mod_base = OTHER; note = 2'-deoxy-2'-fluoro modified nucleotide
  modified_base 10: mod_base = OTHER; note = 2'-deoxy-2'-fluoro modified nucleotide
  modified_base 12: mod_base = OTHER; note = 2'-deoxy-2'-fluoro modified nucleotide
  modified_base 15..16: mod_base = OTHER; note = 2'-deoxy-2'-fluoro modified nucleotide
  modified_base 19: mod_base = OTHER; note = 2'-deoxy-2'-fluoro modified nucleotide
  misc_feature 21: note = Nucleotide linked to an inverted abasic cap
  source 1..21: mol_type = other DNA
  misc_feature 1..3: note = RNA
  misc_feature 4: note = DNA
  misc_feature 5: note = RNA
  misc_feature 6..9: note = DNA
  misc_feature 10: note = RNA
  misc_feature 11: note = DNA
  misc_feature 12: note = RNA
  misc_feature 13..14: note = DNA
  misc_feature 15..16: note = RNA
  misc_feature 17..18: note = DNA
  misc_feature 19: note = RNA
  misc_feature 20..21: note = DNA
ctcatgaagtacaaccagctt

SEQ ID NO: 404 - RNA, 21 nt, synthetic construct
  misc_feature 1..21: note = Synthetic
  modified_base 4..5: mod_base = OTHER; note = 2'-O-methyl modified nucleotide
  modified_base 6..7: mod_base = OTHER; note = 2'-deoxy-2'-fluoro modified nucleotide
  modified_base 8: mod_base = OTHER; note = 2'-O-methyl modified nucleotide
  modified_base 9: mod_base = OTHER; note = 2'-deoxy-2'-fluoro modified nucleotide
  modified_base 10: mod_base = OTHER; note = 2'-O-methyl modified nucleotide
  modified_base 11..14: mod_base = OTHER; note = 2'-deoxy-2'-fluoro modified nucleotide
  modified_base 15: mod_base = OTHER; note = 2'-O-methyl modified nucleotide
  modified_base 16: mod_base = OTHER; note = 2'-deoxy-2'-fluoro modified nucleotide
  modified_base 17..21: mod_base = OTHER; note = 2'-O-methyl modified nucleotide
  source 1..21: mol_type = other RNA
gctggttgtacttcatgagtt

SEQ ID NO: 405 - DNA, 21 bp, synthetic construct
  misc_feature 1..21: note = Synthetic
  misc_feature 1..19: note = ribonucleotide unmodified or modified as described for this sequence
  misc_feature 1: note = Nucleotide linked to an inverted abasic cap
  modified_base 2: mod_base = OTHER; note = 2'-deoxy-2'-fluoro modified nucleotide
  modified_base 4..5: mod_base = OTHER; note = 2'-deoxy-2'-fluoro modified nucleotide
  modified_base 7: mod_base = OTHER; note = 2'-deoxy-2'-fluoro modified nucleotide
  modified_base 12: mod_base = OTHER; note = 2'-deoxy-2'-fluoro modified nucleotide
  modified_base 14: mod_base = OTHER; note = 2'-deoxy-2'-fluoro modified nucleotide
  modified_base 16: mod_base = OTHER; note = 2'-deoxy-2'-fluoro modified nucleotide
  modified_base 19: mod_base = OTHER; note = 2'-deoxy-2'-fluoro modified nucleotide
  misc_feature 21: note = Nucleotide linked to an inverted abasic cap
  source 1..21: mol_type = other DNA
  misc_feature 1: note = DNA
  misc_feature 2: note = RNA
  misc_feature 3: note = DNA
  misc_feature 4..5: note = RNA
  misc_feature 6: note = DNA
  misc_feature 7: note = RNA
  misc_feature 8..11: note = DNA
  misc_feature 12: note = RNA
  misc_feature 13: note = DNA
  misc_feature 14: note = RNA
  misc_feature 15: note = DNA
  misc_feature 16: note = RNA
  misc_feature 17..18: note = DNA
  misc_feature 19: note = RNA
  misc_feature 20..21: note = DNA
atgctacaaggtacgcaattt

SEQ ID NO: 406 - RNA, 21 nt, synthetic construct
  misc_feature 1..21: note = Synthetic
  modified_base 4: mod_base = OTHER; note = 2'-O-methyl modified nucleotide
  modified_base 5: mod_base = OTHER; note = 2'-deoxy-2'-fluoro modified nucleotide
  modified_base 6: mod_base = OTHER; note = 2'-O-methyl modified nucleotide
  modified_base 7: mod_base = OTHER; note = 2'-deoxy-2'-fluoro modified nucleotide
  modified_base 8: mod_base = OTHER; note = 2'-O-methyl modified nucleotide
  modified_base 9..12: mod_base = OTHER; note = 2'-deoxy-2'-fluoro modified nucleotide
  modified_base 13: mod_base = OTHER; note = 2'-O-methyl modified nucleotide
  modified_base 14: mod_base = OTHER; note = 2'-deoxy-2'-fluoro modified nucleotide
  modified_base 15..16: mod_base = OTHER; note = 2'-O-methyl modified nucleotide
  modified_base 17: mod_base = OTHER; note = 2'-deoxy-2'-fluoro modified nucleotide
  modified_base 18: mod_base = OTHER; note = 2'-O-methyl modified nucleotide
  modified_base 19: mod_base = OTHER; note = 2'-deoxy-2'-fluoro modified nucleotide
  modified_base 20..21: mod_base = OTHER; note = 2'-O-methyl modified nucleotide
  source 1..21: mol_type = other RNA
attgcgtaccttgtagcattt

SEQ ID NO: 407 - DNA, 21 bp, synthetic construct
  misc_feature 1..21: note = Synthetic
  misc_feature 1..19: note = ribonucleotide unmodified or modified as described for this sequence
  misc_feature 1: note = Nucleotide linked to an inverted abasic cap
  modified_base 1..2: mod_base = OTHER; note = 2'-deoxy-2'-fluoro modified nucleotide
  modified_base 5: mod_base = OTHER; note = 2'-deoxy-2'-fluoro modified nucleotide
  modified_base 7..8: mod_base = OTHER; note = 2'-deoxy-2'-fluoro modified nucleotide
  modified_base 12..14: mod_base = OTHER; note = 2'-deoxy-2'-fluoro modified nucleotide
  modified_base 18..19: mod_base = OTHER; note = 2'-deoxy-2'-fluoro modified nucleotide
  misc_feature 21: note = Nucleotide linked to an inverted abasic cap
  source 1..21: mol_type = other DNA
  misc_feature 1..2: note = RNA
  misc_feature 3..4: note = DNA
  misc_feature 5: note = RNA
  misc_feature 6: note = DNA
  misc_feature 7..8: note = RNA
  misc_feature 9..11: note = DNA
  misc_feature 12..14: note = RNA
  misc_feature 15..17: note = DNA
  misc_feature 18..19: note = RNA
  misc_feature 20..21: note = DNA
ctgacattgaacccaaatttt

SEQ ID NO: 408 - RNA, 21 nt, synthetic construct
  misc_feature 1..21: note = Synthetic
  modified_base 4..5: mod_base = OTHER; note = 2'-deoxy-2'-fluoro modified nucleotide
  modified_base 6..8: mod_base = OTHER; note = 2'-O-methyl modified nucleotide
  modified_base 9..11: mod_base = OTHER; note = 2'-deoxy-2'-fluoro modified nucleotide
  modified_base 12..13: mod_base = OTHER; note = 2'-O-methyl modified nucleotide
  modified_base 14: mod_base = OTHER; note = 2'-deoxy-2'-fluoro modified nucleotide
  modified_base 15: mod_base = OTHER; note = 2'-O-methyl modified nucleotide
  modified_base 16..17: mod_base = OTHER; note = 2'-deoxy-2'-fluoro modified nucleotide
  modified_base 18..21: mod_base = OTHER; note = 2'-O-methyl modified nucleotide
  source 1..21: mol_type = other RNA
aatttgggttcaatgtcagtt

SEQ ID NO: 409 - DNA, 21 bp, synthetic construct
  misc_feature 1..21: note = Synthetic
  misc_feature 1..19: note = ribonucleotide unmodified or modified as described for this sequence
  misc_feature 1: note = Nucleotide linked to an inverted abasic cap
  modified_base 3..5: mod_base = OTHER; note = 2'-deoxy-2'-fluoro modified nucleotide
  modified_base 8..10: mod_base = OTHER; note = 2'-deoxy-2'-fluoro modified nucleotide
  modified_base 12..13: mod_base = OTHER; note = 2'-deoxy-2'-fluoro modified nucleotide
  modified_base 16: mod_base = OTHER; note = 2'-deoxy-2'-fluoro modified nucleotide
  modified_base 18..19: mod_base = OTHER; note = 2'-deoxy-2'-fluoro modified nucleotide
  misc_feature 21: note = Nucleotide linked to an inverted abasic cap
  source 1..21: mol_type = other DNA
  misc_feature 1..2: note = DNA
  misc_feature 3..5: note = RNA
  misc_feature 6..7: note = DNA
  misc_feature 8..10: note = RNA
  misc_feature 11: note = DNA
  misc_feature 12..13: note = RNA
  misc_feature 14..15: note = DNA
  misc_feature 16: note = RNA
  misc_feature 17: note = DNA
  misc_feature 18..19: note = RNA
  misc_feature 20..21: note = DNA
agcccagtttgctgacatttt

SEQ ID NO: 410 - RNA, 21 nt, synthetic construct
  misc_feature 1..21: note = Synthetic
  modified_base 4: mod_base = OTHER; note = 2'-O-methyl modified nucleotide
  modified_base 5..6: mod_base = OTHER; note = 2'-deoxy-2'-fluoro modified nucleotide
  modified_base 7..8: mod_base = OTHER; note = 2'-O-methyl modified nucleotide
  modified_base 9: mod_base = OTHER; note = 2'-deoxy-2'-fluoro modified nucleotide
  modified_base 10..12: mod_base = OTHER; note = 2'-O-methyl modified nucleotide
  modified_base 13..14: mod_base = OTHER; note = 2'-deoxy-2'-fluoro modified nucleotide
  modified_base 15..17: mod_base = OTHER; note = 2'-O-methyl modified nucleotide
  modified_base 18..19: mod_base = OTHER; note = 2'-deoxy-2'-fluoro modified nucleotide
  modified_base 20..21: mod_base = OTHER; note = 2'-O-methyl modified nucleotide
  source 1..21: mol_type = other RNA
aatgtcagcaaactgggcttt

SEQ ID NO: 411 - DNA, 21 bp, synthetic construct
  misc_feature 1..21: note = Synthetic
  misc_feature 1..19: note = ribonucleotide unmodified or modified as described for this sequence
  misc_feature 1: note = Nucleotide linked to an inverted abasic cap
  modified_base 2..4: mod_base = OTHER; note = 2'-deoxy-2'-fluoro modified nucleotide
  modified_base 7..9: mod_base = OTHER; note = 2'-deoxy-2'-fluoro modified nucleotide
  modified_base 11..12: mod_base = OTHER; note = 2'-deoxy-2'-fluoro modified nucleotide
  modified_base 15: mod_base = OTHER; note = 2'-deoxy-2'-fluoro modified nucleotide
  modified_base 17..18: mod_base = OTHER; note = 2'-deoxy-2'-fluoro modified nucleotide
  misc_feature 21: note = Nucleotide linked to an inverted abasic cap
  source 1..21: mol_type = other DNA
  misc_feature 1: note = DNA
  misc_feature 2..4: note = RNA
  misc_feature 5..6: note = DNA
  misc_feature 7..9: note = RNA
  misc_feature 10: note = DNA
  misc_feature 11..12: note = RNA
  misc_feature 13..14: note = DNA
  misc_feature 15: note = RNA
  misc_feature 16: note = DNA
  misc_feature 17..18: note = RNA
  misc_feature 19..21: note = DNA
gcccagtttgctgacattgtt

SEQ ID NO: 412 - RNA, 21 nt, synthetic construct
  misc_feature 1..21: note = Synthetic
  modified_base 4: mod_base = OTHER; note = 2'-deoxy-2'-fluoro modified nucleotide
  modified_base 5: mod_base = OTHER; note = 2'-O-methyl modified nucleotide
  modified_base 6..7: mod_base = OTHER; note = 2'-deoxy-2'-fluoro modified nucleotide
  modified_base 8..9: mod_base = OTHER; note = 2'-O-methyl modified nucleotide
  modified_base 10: mod_base = OTHER; note = 2'-deoxy-2'-fluoro modified nucleotide
  modified_base 11..13: mod_base = OTHER; note = 2'-O-methyl modified nucleotide
  modified_base 14..15: mod_base = OTHER; note = 2'-deoxy-2'-fluoro modified nucleotide
  modified_base 16..18: mod_base = OTHER; note = 2'-O-methyl modified nucleotide
  modified_base 19: mod_base = OTHER; note = 2'-deoxy-2'-fluoro modified nucleotide
  modified_base 20..21: mod_base = OTHER; note = 2'-O-methyl modified nucleotide
  source 1..21: mol_type = other RNA
caatgtcagcaaactgggctt

SEQ ID NO: 413 - DNA, 21 bp, synthetic construct
  misc_feature 1..21: note = Synthetic
  misc_feature 1..19: note = ribonucleotide unmodified or modified as described for this sequence
  misc_feature 1: note = Nucleotide linked to an inverted abasic cap
  modified_base 2..4: mod_base = OTHER; note = 2'-deoxy-2'-fluoro modified nucleotide
  modified_base 7..8: mod_base = OTHER; note = 2'-deoxy-2'-fluoro modified nucleotide
  modified_base 10: mod_base = OTHER; note = 2'-deoxy-2'-fluoro modified nucleotide
  modified_base 15..16: mod_base = OTHER; note = 2'-deoxy-2'-fluoro modified nucleotide
  modified_base 18..19: mod_base = OTHER; note = 2'-deoxy-2'-fluoro modified nucleotide
  misc_feature 21: note = Nucleotide linked to an inverted abasic cap
  source 1..21: mol_type = other DNA
  misc_feature 1: note = DNA
  misc_feature 2..4: note = RNA
  misc_feature 5..6: note = DNA
  misc_feature 7..8: note = RNA
  misc_feature 9: note = DNA
  misc_feature 10: note = RNA
  misc_feature 11..14: note = DNA
  misc_feature 15..16: note = RNA
  misc_feature 17: note = DNA
  misc_feature 18..19: note = RNA
  misc_feature 20..21: note = DNA
gcccggctgcgaaaccatttt

SEQ ID NO: 414 - RNA, 21 nt, synthetic construct
  misc_feature 1..21: note = Synthetic
  modified_base 4..5: mod_base = OTHER; note = 2'-O-methyl modified nucleotide
  modified_base 6..9: mod_base = OTHER; note = 2'-deoxy-2'-fluoro modified nucleotide
  modified_base 10: mod_base = OTHER; note = 2'-O-methyl modified nucleotide
  modified_base 11: mod_base = OTHER; note = 2'-deoxy-2'-fluoro modified nucleotide
  modified_base 12..13: mod_base = OTHER; note = 2'-O-methyl modified nucleotide
  modified_base 14..15: mod_base = OTHER; note = 2'-deoxy-2'-fluoro modified nucleotide
  modified_base 16..18: mod_base = OTHER; note = 2'-O-methyl modified nucleotide
  modified_base 19: mod_base = OTHER; note = 2'-deoxy-2'-fluoro modified nucleotide
  modified_base 20..21: mod_base = OTHER; note = 2'-O-methyl modified nucleotide
  source 1..21: mol_type = other RNA
aatggtttcgcagccgggctt

SEQ ID NO: 415 - DNA, 21 bp, synthetic construct
  misc_feature 1..21: note = Synthetic
  misc_feature 1..19: note = ribonucleotide unmodified or modified as described for this sequence
  misc_feature 1: note = Nucleotide linked to an inverted abasic cap
  modified_base 3: mod_base = OTHER; note = 2'-deoxy-2'-fluoro modified nucleotide
  modified_base 5: mod_base = OTHER; note = 2'-deoxy-2'-fluoro modified nucleotide
  modified_base 8..10: mod_base = OTHER; note = 2'-deoxy-2'-fluoro modified nucleotide
  modified_base 12..14: mod_base = OTHER; note = 2'-deoxy-2'-fluoro modified nucleotide
  modified_base 18..19: mod_base = OTHER; note = 2'-deoxy-2'-fluoro modified nucleotide
  misc_feature 21: note = Nucleotide linked to an inverted abasic cap
  source 1..21: mol_type = other DNA
  misc_feature 1..2: note = DNA
  misc_feature 3: note = RNA
  misc_feature 4: note = DNA
  misc_feature 5: note = RNA
  misc_feature 6..7: note = DNA
  misc_feature 8..10: note = RNA
  misc_feature 11: note = DNA
  misc_feature 12..14: note = RNA
  misc_feature 15..17: note = DNA
  misc_feature 18..19: note = RNA
  misc_feature 20..21: note = DNA
ggtacaatttatctaaacttt

SEQ ID NO: 416 - RNA, 21 nt, synthetic construct
  misc_feature 1..21: note = Synthetic
  modified_base 4..5: mod_base = OTHER; note = 2'-deoxy-2'-fluoro modified nucleotide
  modified_base 6..8: mod_base = OTHER; note = 2'-O-methyl modified nucleotide
  modified_base 9: mod_base = OTHER; note = 2'-deoxy-2'-fluoro modified nucleotide
  modified_base 10..12: mod_base = OTHER; note = 2'-O-methyl modified nucleotide
  modified_base 13..14: mod_base = OTHER; note = 2'-deoxy-2'-fluoro modified nucleotide
  modified_base 15: mod_base = OTHER; note = 2'-O-methyl modified nucleotide
  modified_base 16: mod_base = OTHER; note = 2'-deoxy-2'-fluoro modified nucleotide
  modified_base 17: mod_base = OTHER; note = 2'-O-methyl modified nucleotide
  modified_base 18..19: mod_base = OTHER; note = 2'-deoxy-2'-fluoro modified nucleotide
  modified_base 20..21: mod_base = OTHER; note = 2'-O-methyl modified nucleotide
  source 1..21: mol_type = other RNA
agtttagataaattgtacctt

SEQ ID NO: 417 - RNA, 21 nt, synthetic construct
  misc_feature 1..21: note = Synthetic
  modified_base 5: mod_base = OTHER; note = 2'-O-methyl modified nucleotide
  modified_base 7: mod_base = OTHER; note = 2'-O-methyl modified nucleotide
  modified_base 9: mod_base = OTHER; note = 2'-O-methyl modified nucleotide
  modified_base 11: mod_base = OTHER; note = 2'-O-methyl modified nucleotide
  modified_base 13: mod_base = OTHER; note = 2'-O-methyl modified nucleotide
  modified_base 16: mod_base = OTHER; note = 2'-O-methyl modified nucleotide
  modified_base 18: mod_base = OTHER; note = 2'-O-methyl modified nucleotide
  modified_base 20..21: mod_base = OTHER; note = 2'-O-methyl modified nucleotide
  modified_base 20..21: mod_base = OTHER; note = phosphorothioate linkage
  source 1..21: mol_type = other RNA
taatatatacatgtcacactt

SEQ ID NO: 418 - DNA, 21 bp, synthetic construct
  misc_feature 1..21: note = Synthetic
  misc_feature 1..19: note = ribonucleotide unmodified or modified as described for this sequence
  misc_feature 1: note = Nucleotide linked to an inverted abasic cap
  modified_base 1: mod_base = OTHER; note = 2'-deoxy-2'-fluoro modified nucleotide
  modified_base 4..8: mod_base = OTHER; note = 2'-deoxy-2'-fluoro modified nucleotide
  modified_base 10: mod_base = OTHER; note = 2'-deoxy-2'-fluoro modified nucleotide
  modified_base 15: mod_base = OTHER; note = 2'-deoxy-2'-fluoro modified nucleotide
  modified_base 17: mod_base = OTHER; note = 2'-deoxy-2'-fluoro modified nucleotide
  misc_feature 21: note = Nucleotide linked to an inverted abasic cap
  source 1..21: mol_type = other DNA
  misc_feature 1: note = RNA
  misc_feature 2..3: note = DNA
  misc_feature 4..8: note = RNA
  misc_feature 9: note = DNA
  misc_feature 10: note = RNA
  misc_feature 11..14: note = DNA
  misc_feature 15: note = RNA
  misc_feature 16: note = DNA
  misc_feature 17: note = RNA
  misc_feature 18..21: note = DNA
caaccctcatgaagtacaatt

SEQ ID NO: 419 - RNA, 21 nt, synthetic construct
  misc_feature 1..21: note = Synthetic
  modified_base 4: mod_base = OTHER; note = 2'-deoxy-2'-fluoro modified nucleotide
  modified_base 5: mod_base = OTHER; note = 2'-O-methyl modified nucleotide
  modified_base 6..9: mod_base = OTHER; note = 2'-deoxy-2'-fluoro modified nucleotide
  modified_base 10: mod_base = OTHER; note = 2'-O-methyl modified nucleotide
  modified_base 11: mod_base = OTHER; note = 2'-deoxy-2'-fluoro modified nucleotide
  modified_base 12..13: mod_base = OTHER; note = 2'-O-methyl modified nucleotide
  modified_base 15..16: mod_base = OTHER; note = 2'-O-methyl modified nucleotide
  modified_base 17..18: mod_base = OTHER; note = 2'-deoxy-2'-fluoro modified nucleotide
  modified_base 19..21: mod_base = OTHER; note = 2'-O-methyl modified nucleotide
  source 1..21: mol_type = other RNA
ttgtacttcatgagggttgtt

SEQ ID NO: 420 - RNA, 21 nt, synthetic construct
  misc_feature 1..21: note = Synthetic
  modified_base 2: mod_base = OTHER; note = 2'-O-methyl modified nucleotide
  modified_base 4..5: mod_base = OTHER; note = 2'-O-methyl modified nucleotide
  modified_base 7: mod_base = OTHER; note = 2'-O-methyl modified nucleotide
  modified_base 13: mod_base = OTHER; note = 2'-O-methyl modified nucleotide
  modified_base 16: mod_base = OTHER; note = 2'-O-methyl modified nucleotide
  modified_base 19..21: mod_base = OTHER; note = 2'-O-methyl modified nucleotide
  modified_base 20..21: mod_base = OTHER; note = phosphorothioate linkage
  source 1..21: mol_type = other RNA
acttcatgagggttgcgactt

SEQ ID NO: 421 - DNA, 21 bp, synthetic construct
  misc_feature 1..21: note = Synthetic
  misc_feature 1..19: note = ribonucleotide unmodified or modified as described for this sequence
  misc_feature 1: note = Nucleotide linked to an inverted abasic cap
  modified_base 1..5: mod_base = OTHER; note = 2'-deoxy-2'-fluoro modified nucleotide
  modified_base 10..14: mod_base = OTHER; note = 2'-deoxy-2'-fluoro modified nucleotide
  modified_base 17..19: mod_base = OTHER; note = 2'-deoxy-2'-fluoro modified nucleotide
  misc_feature 21: note = Nucleotide linked to an inverted abasic cap
  source 1..21: mol_type = other DNA
  misc_feature 1..5: note = RNA
  misc_feature 6..9: note = DNA
  misc_feature 10..14: note = RNA
  misc_feature 15..16: note = DNA
  misc_feature 17..19: note = RNA
  misc_feature 20..21: note = DNA
cttctagagcctttgatcctt

SEQ ID NO: 422 - RNA, 21 nt, synthetic construct
  misc_feature 1..21: note = Synthetic
  modified_base 4..5: mod_base = OTHER; note = 2'-deoxy-2'-fluoro modified nucleotide
  modified_base 6..10: mod_base = OTHER; note = 2'-O-methyl modified nucleotide
  modified_base 11..14: mod_base = OTHER; note = 2'-deoxy-2'-fluoro modified nucleotide
  modified_base 15..21: mod_base = OTHER; note = 2'-O-methyl modified nucleotide
  source 1..21: mol_type = other RNA
ggatcaaaggctctagaagtt

SEQ ID NO: 423 - DNA, 21 bp, synthetic construct
  misc_feature 1..21: note = Synthetic
  misc_feature 1..19: note = ribonucleotide unmodified or modified as described for this sequence
  misc_feature 1: note = Nucleotide linked to an inverted abasic cap
  modified_base 4: mod_base = OTHER; note = 2'-deoxy-2'-fluoro modified nucleotide
  modified_base 10..11: mod_base = OTHER; note = 2'-deoxy-2'-fluoro modified nucleotide
  modified_base 13: mod_base = OTHER; note = 2'-deoxy-2'-fluoro modified nucleotide
  modified_base 16..17: mod_base = OTHER; note = 2'-deoxy-2'-fluoro modified nucleotide
  modified_base 19: mod_base = OTHER; note = 2'-deoxy-2'-fluoro modified nucleotide
  misc_feature 21: note = Nucleotide linked to an inverted abasic cap
  source 1..21: mol_type = other DNA
  misc_feature 1..3: note = DNA
  misc_feature 4: note = RNA
  misc_feature 5..9: note = DNA
  misc_feature 10..11: note = RNA
  misc_feature 12: note = DNA
  misc_feature 13: note = RNA
  misc_feature 14..15: note = DNA
  misc_feature 16..17: note = RNA
  misc_feature 18: note = DNA
  misc_feature 19: note = RNA
  misc_feature 20..21: note = DNA
ggacgaaagccatggttgctt

SEQ ID NO: 424 - RNA, 21 nt, synthetic construct
  misc_feature 1..21: note = Synthetic
  modified_base 4: mod_base = OTHER; note = 2'-O-methyl modified nucleotide
  modified_base 5..6: mod_base = OTHER; note = 2'-deoxy-2'-fluoro modified nucleotide
  modified_base 7: mod_base = OTHER; note = 2'-O-methyl modified nucleotide
  modified_base 8: mod_base = OTHER; note = 2'-deoxy-2'-fluoro modified nucleotide
  modified_base 9..10: mod_base = OTHER; note = 2'-O-methyl modified nucleotide
  modified_base 11..15: mod_base = OTHER; note = 2'-deoxy-2'-fluoro modified nucleotide
  modified_base 16: mod_base = OTHER; note = 2'-O-methyl modified nucleotide
  modified_base 17..19: mod_base = OTHER; note = 2'-deoxy-2'-fluoro modified nucleotide
  modified_base 20..21: mod_base = OTHER; note = 2'-O-methyl modified nucleotide
  source 1..21: mol_type = other RNA
gcaaccatggctttcgtcctt

SEQ ID NO: 425 - DNA, 21 bp, synthetic construct
  misc_feature 1..21: note = Synthetic
  misc_feature 1..19: note = ribonucleotide unmodified or modified as described for this sequence
  misc_feature 1: note = Nucleotide linked to an inverted abasic cap
  modified_base 4..5: mod_base = OTHER; note = 2'-deoxy-2'-fluoro modified nucleotide
  modified_base 9..11: mod_base = OTHER; note = 2'-deoxy-2'-fluoro modified nucleotide
  modified_base 14: mod_base = OTHER; note = 2'-deoxy-2'-fluoro modified nucleotide
  modified_base 18..19: mod_base = OTHER; note = 2'-deoxy-2'-fluoro modified nucleotide
  misc_feature 21: note = Nucleotide linked to an inverted abasic cap
  source 1..21: mol_type = other DNA
  misc_feature 1..3: note = DNA
  misc_feature 4..5: note = RNA
  misc_feature 6..8: note = DNA
  misc_feature 9..11: note = RNA
  misc_feature 12..13: note = DNA
  misc_feature 14: note = RNA
  misc_feature 15..17: note = DNA
  misc_feature 18..19: note = RNA
  misc_feature 20..21: note = DNA
gggttgaactcaataaacctt

SEQ ID NO: 426 - RNA, 21 nt, synthetic construct
  misc_feature 1..21: note = Synthetic
  modified_base 4..5: mod_base = OTHER; note = 2'-deoxy-2'-fluoro modified nucleotide
  modified_base 6: mod_base = OTHER; note = 2'-O-methyl modified nucleotide
  modified_base 7..8: mod_base = OTHER; note = 2'-deoxy-2'-fluoro modified nucleotide
  modified_base 9..11: mod_base = OTHER; note = 2'-O-methyl modified nucleotide
  modified_base 12..14: mod_base = OTHER; note = 2'-deoxy-2'-fluoro modified nucleotide
  modified_base 15..16: mod_base = OTHER; note = 2'-O-methyl modified nucleotide
  modified_base 17..19: mod_base = OTHER; note = 2'-deoxy-2'-fluoro modified nucleotide
  modified_base 20..21: mod_base = OTHER; note = 2'-O-methyl modified nucleotide
  source 1..21: mol_type = other RNA
ggtttattgagttcaaccctt

SEQ ID NO: 427 - DNA, 21 bp, synthetic construct
  misc_feature 1..21: note = Synthetic
  misc_feature 1..19: note = ribonucleotide unmodified or modified as described for this sequence
  misc_feature 1: note = Nucleotide linked to an inverted abasic cap
  modified_base 2: mod_base = OTHER; note = 2'-deoxy-2'-fluoro modified nucleotide
  modified_base 5: mod_base = OTHER; note = 2'-deoxy-2'-fluoro modified nucleotide
  modified_base 10..11: mod_base = OTHER; note = 2'-deoxy-2'-fluoro modified nucleotide
  modified_base 13..15: mod_base = OTHER; note = 2'-deoxy-2'-fluoro modified nucleotide
  modified_base 19: mod_base = OTHER; note = 2'-deoxy-2'-fluoro modified nucleotide
  misc_feature 21: note = Nucleotide linked to an inverted abasic cap
  source 1..21: mol_type = other DNA
  misc_feature 1: note = DNA
  misc_feature 2: note = RNA
  misc_feature 3..4: note = DNA
  misc_feature 5: note = RNA
  misc_feature 6..9: note = DNA
  misc_feature 10..11: note = RNA
  misc_feature 12: note = DNA
  misc_feature 13..15: note = RNA
  misc_feature 16..18: note = DNA
  misc_feature 19: note = RNA
  misc_feature 20..21: note = DNA
gcgataagatcacctggattt

SEQ ID NO: 428 - RNA, 21 nt, synthetic construct
  misc_feature 1..21: note = Synthetic
  modified_base 4: mod_base = OTHER; note = 2'-deoxy-2'-fluoro modified nucleotide
  modified_base 5..7: mod_base = OTHER; note = 2'-O-methyl modified nucleotide
  modified_base 8: mod_base = OTHER; note = 2'-deoxy-2'-fluoro modified nucleotide
  modified_base 9..10: mod_base = OTHER; note = 2'-O-methyl modified nucleotide
  modified_base 11..14: mod_base = OTHER; note = 2'-deoxy-2'-fluoro modified nucleotide
  modified_base 15: mod_base = OTHER; note = 2'-O-methyl modified nucleotide
  modified_base 16..17: mod_base = OTHER; note = 2'-deoxy-2'-fluoro modified nucleotide
  modified_base 18: mod_base = OTHER; note = 2'-O-methyl modified nucleotide
  modified_base 19: mod_base = OTHER; note = 2'-deoxy-2'-fluoro modified nucleotide
  modified_base 20..21: mod_base = OTHER; note = 2'-O-methyl modified nucleotide
  source 1..21: mol_type = other RNA
atccaggtgatcttatcgctt

SEQ ID NO: 429 - RNA, 21 nt, synthetic construct
  misc_feature 1..21: note = Synthetic
  misc_feature 1: note = Nucleotide linked to an inverted abasic cap
  modified_base 20..21: mod_base = OTHER; note = 2'-O-methyl modified nucleotide
  modified_base 20..21: mod_base = OTHER; note = phosphorothioate linkage
  misc_feature 21: note = Nucleotide linked to an inverted abasic cap
  source 1..21: mol_type = other RNA
gatgtgtgacatgtatatatt

SEQ ID NO: 430 - RNA, 21 nt, synthetic construct
  misc_feature 1..21: note = Synthetic
  modified_base 20..21: mod_base = OTHER; note = 2'-O-methyl modified nucleotide
  modified_base 20..21: mod_base = OTHER; note = phosphorothioate linkage
  source 1..21: mol_type = other RNA
tatatacatgtcacacatctt

SEQ ID NO: 431 - DNA, 21 bp, synthetic construct
  misc_feature 1..21: note = Synthetic
  misc_feature 1..19: note = ribonucleotide unmodified or modified as described for this sequence
  misc_feature 1: note = Nucleotide linked to an inverted abasic cap
  modified_base 1: mod_base = OTHER; note = 2'-deoxy-2'-fluoro modified nucleotide
  modified_base 3: mod_base = OTHER; note = 2'-deoxy-2'-fluoro modified nucleotide
  modified_base 9..10: mod_base = OTHER; note = 2'-deoxy-2'-fluoro modified nucleotide
  modified_base 14..16: mod_base = OTHER; note = 2'-deoxy-2'-fluoro modified nucleotide
  modified_base 19: mod_base = OTHER; note = 2'-deoxy-2'-fluoro modified nucleotide
  misc_feature 21: note = Nucleotide linked to an inverted abasic cap
  source 1..21: mol_type = other DNA
  misc_feature 1: note = RNA
  misc_feature 2: note = DNA
  misc_feature 3: note = RNA
  misc_feature 4..8: note = DNA
  misc_feature 9..10: note = RNA
  misc_feature 11..13: note = DNA
  misc_feature 14..16: note = RNA
  misc_feature 17..18: note = DNA
  misc_feature 19: note = RNA
  misc_feature 20..21: note = DNA
tgtgagggttgaactcaattt

SEQ ID NO: 432 - RNA, 21 nt, synthetic construct
  misc_feature 1..21: note = Synthetic
  modified_base 4..6: mod_base = OTHER; note = 2'-O-methyl modified nucleotide
  modified_base 7..9: mod_base = OTHER; note = 2'-deoxy-2'-fluoro modified nucleotide
  modified_base 10..11: mod_base = OTHER; note = 2'-O-methyl modified nucleotide
  modified_base 12..16: mod_base = OTHER; note = 2'-deoxy-2'-fluoro modified nucleotide
  modified_base 17: mod_base = OTHER; note = 2'-O-methyl modified nucleotide
  modified_base 18: mod_base = OTHER; note = 2'-deoxy-2'-fluoro modified nucleotide
  modified_base 19..21: mod_base = OTHER; note = 2'-O-methyl modified nucleotide
  source 1..21: mol_type = other RNA
attgagttcaaccctcacatt

SEQ ID NO: 433 - RNA, 21 nt, synthetic construct
  misc_feature 1..21: note = Synthetic
  modified_base 4: mod_base = OTHER; note = 2'-deoxy-2'-fluoro modified nucleotide
  modified_base 5: mod_base = OTHER; note = 2'-O-methyl modified nucleotide
  modified_base 6: mod_base = OTHER; note = 2'-deoxy-2'-fluoro modified nucleotide
  modified_base 7: mod_base = OTHER; note = 2'-O-methyl modified nucleotide
  modified_base 8: mod_base = OTHER; note = 2'-deoxy-2'-fluoro modified nucleotide
  modified_base 9: mod_base = OTHER; note = 2'-O-methyl modified nucleotide
  modified_base 10: mod_base = OTHER; note = 2'-deoxy-2'-fluoro modified nucleotide
  modified_base 11: mod_base = OTHER; note = 2'-O-methyl modified nucleotide
  modified_base 12: mod_base = OTHER; note = 2'-deoxy-2'-fluoro modified nucleotide
  modified_base 13..14: mod_base = OTHER; note = 2'-O-methyl modified nucleotide
  modified_base 15: mod_base = OTHER; note = 2'-deoxy-2'-fluoro modified nucleotide
  modified_base 16: mod_base = OTHER; note = 2'-O-methyl modified nucleotide
  modified_base 17: mod_base = OTHER; note = 2'-deoxy-2'-fluoro modified nucleotide
  modified_base 18: mod_base = OTHER; note = 2'-O-methyl modified nucleotide
  modified_base 19: mod_base = OTHER; note = 2'-deoxy-2'-fluoro modified nucleotide
  modified_base 20..21: mod_base = OTHER; note = 2'-O-methyl modified nucleotide
  modified_base 20..21: mod_base = OTHER; note = phosphorothioate linkage
  source 1..21: mol_type = other RNA
aatatatacatgtcacacatt

SEQ ID NO: 434 - DNA, 21 bp, synthetic construct
  misc_feature 1..21: note = Synthetic
  misc_feature 1..19: note = ribonucleotide unmodified or modified as described for this sequence
  misc_feature 1: note = Nucleotide linked to an inverted abasic cap
  modified_base 1..3: mod_base = OTHER; note = 2'-deoxy-2'-fluoro modified nucleotide
  modified_base 5: mod_base = OTHER; note = 2'-deoxy-2'-fluoro modified nucleotide
  modified_base 7..8: mod_base = OTHER; note = 2'-deoxy-2'-fluoro modified nucleotide
  modified_base 12: mod_base = OTHER; note = 2'-deoxy-2'-fluoro modified nucleotide
  modified_base 14: mod_base = OTHER; note = 2'-deoxy-2'-fluoro modified nucleotide
  modified_base 17..19: mod_base = OTHER; note = 2'-deoxy-2'-fluoro modified nucleotide
  misc_feature 21: note = Nucleotide linked to an inverted abasic cap
  source 1..21: mol_type = other DNA
  misc_feature 1..3: note = RNA
  misc_feature 4: note = DNA
  misc_feature 5: note = RNA
  misc_feature 6: note = DNA
  misc_feature 7..8: note = RNA
  misc_feature 9..11: note = DNA
  misc_feature 12: note = RNA
  misc_feature 13: note = DNA
  misc_feature 14: note = RNA
  misc_feature 15..16: note = DNA
  misc_feature 17..19: note = RNA
  misc_feature 20..21: note = DNA
tctatattaggtacaattttt

SEQ ID NO: 435 - RNA, 21 nt, synthetic construct
  misc_feature 1..21: note = Synthetic
  modified_base 4..5: mod_base = OTHER; note = 2'-deoxy-2'-fluoro modified nucleotide
  modified_base 6: mod_base = OTHER; note = 2'-O-methyl modified nucleotide
  modified_base 7: mod_base = OTHER; note = 2'-deoxy-2'-fluoro modified nucleotide
  modified_base 8: mod_base = OTHER; note = 2'-O-methyl modified nucleotide
  modified_base 9..11: mod_base = OTHER; note = 2'-deoxy-2'-fluoro modified nucleotide
  modified_base 12..13: mod_base = OTHER; note = 2'-O-methyl modified nucleotide
  modified_base 14: mod_base = OTHER; note = 2'-deoxy-2'-fluoro modified nucleotide
  modified_base 15: mod_base = OTHER; note = 2'-O-methyl modified nucleotide
  modified_base 16: mod_base = OTHER; note = 2'-deoxy-2'-fluoro modified nucleotide
  modified_base 17..21: mod_base = OTHER; note = 2'-O-methyl modified nucleotide
  source 1..21: mol_type = other RNA
aaattgtacctaatatagatt

SEQ ID NO: 436 - DNA, 21 bp, synthetic construct
  misc_feature 1..21: note = Synthetic
  misc_feature 1..19: note = ribonucleotide unmodified or modified as described for this sequence
  misc_feature 1: note = Nucleotide linked to an inverted abasic cap
  modified_base 1: mod_base = OTHER; note = 2'-deoxy-2'-fluoro modified nucleotide
  modified_base 3: mod_base = OTHER; note = 2'-deoxy-2'-fluoro modified nucleotide
  modified_base 5..6: mod_base = OTHER; note = 2'-deoxy-2'-fluoro modified nucleotide
  modified_base 8: mod_base = OTHER; note = 2'-deoxy-2'-fluoro modified nucleotide
  modified_base 13: mod_base = OTHER; note = 2'-deoxy-2'-fluoro modified nucleotide
  modified_base 15: mod_base = OTHER; note = 2'-deoxy-2'-fluoro modified nucleotide
  modified_base 17: mod_base = OTHER; note = 2'-deoxy-2'-fluoro modified nucleotide
  misc_feature 21: note = Nucleotide linked to an inverted abasic cap
  source 1..21: mol_type = other DNA
  misc_feature 1: note = RNA
  misc_feature 2: note = DNA
  misc_feature 3: note = RNA
  misc_feature 4: note = DNA
  misc_feature 5..6: note = RNA
  misc_feature 7: note = DNA
  misc_feature 8: note = RNA
  misc_feature 9..12: note = DNA
  misc_feature 13: note = RNA
  misc_feature 14: note = DNA
  misc_feature 15: note = RNA
  misc_feature 16: note = DNA
  misc_feature 17: note = RNA
  misc_feature 18..21: note = DNA
tatgctacaaggtacgcaatt

SEQ ID NO: 437 - RNA, 21 nt, synthetic construct
  misc_feature 1..21: note = Synthetic
  modified_base 4: mod_base = OTHER; note = 2'-deoxy-2'-fluoro modified nucleotide
  modified_base 5: mod_base = OTHER; note = 2'-O-methyl modified nucleotide
  modified_base 6: mod_base = OTHER; note = 2'-deoxy-2'-fluoro modified nucleotide
  modified_base 7: mod_base = OTHER; note = 2'-O-methyl modified nucleotide
  modified_base 8..11: mod_base = OTHER; note = 2'-deoxy-2'-fluoro modified nucleotide
  modified_base 12: mod_base = OTHER; note = 2'-O-methyl modified nucleotide
  modified_base 13: mod_base = OTHER; note = 2'-deoxy-2'-fluoro modified nucleotide
  modified_base 15: mod_base = OTHER; note = 2'-O-methyl modified nucleotide
  modified_base 16: mod_base = OTHER; note = 2'-deoxy-2'-fluoro modified nucleotide
  modified_base 17: mod_base = OTHER; note = 2'-O-methyl modified nucleotide
  modified_base 18: mod_base = OTHER; note = 2'-deoxy-2'-fluoro modified nucleotide
  modified_base 19..21: mod_base = OTHER; note = 2'-O-methyl modified nucleotide
  source 1..21: mol_type = other RNA
ttgcgtaccttgtagcatatt

SEQ ID NO: 438 - RNA, 21 nt, synthetic construct
  misc_feature 1..21: note = Synthetic
  modified_base 5: mod_base = OTHER; note = 2'-O-methyl modified nucleotide
  modified_base 20..21: mod_base = OTHER; note = 2'-O-methyl modified nucleotide
  source 1..21: mol_type = other RNA
acttcatgagggttgcgactt

SEQ ID NO: 439 - DNA, 21 bp, synthetic construct
  misc_feature 1..21: note = Synthetic
  misc_feature 1..19: note = ribonucleotide unmodified or modified as described for this sequence
  misc_feature 1: note = Nucleotide linked to an inverted abasic cap
  modified_base 1..2: mod_base = OTHER; note = 2'-deoxy-2'-fluoro modified nucleotide
  modified_base 5: mod_base = OTHER; note = 2'-deoxy-2'-fluoro modified nucleotide
  modified_base 11: mod_base = OTHER; note = 2'-deoxy-2'-fluoro modified nucleotide
  modified_base 13..18: mod_base = OTHER; note = 2'-deoxy-2'-fluoro modified nucleotide
  misc_feature 21: note = Nucleotide linked to an inverted abasic cap
  source 1..21: mol_type = other DNA
  misc_feature 1..2: note = RNA
  misc_feature 3..4: note = DNA
  misc_feature 5: note = RNA
  misc_feature 6..10: note = DNA
  misc_feature 11: note = RNA
  misc_feature 12: note = DNA
  misc_feature 13..18: note = RNA
  misc_feature 19..21: note = DNA
tcggtaaagacgtcttctatt

SEQ ID NO: 440 - RNA, 21 nt, synthetic construct
  misc_feature 1..21: note = Synthetic
  modified_base 4..7: mod_base = OTHER; note = 2'-O-methyl modified nucleotide
  modified_base 8: mod_base = OTHER; note = 2'-deoxy-2'-fluoro modified nucleotide
  modified_base 9: mod_base = OTHER; note = 2'-O-methyl modified nucleotide
  modified_base 10..14: mod_base = OTHER; note = 2'-deoxy-2'-fluoro modified nucleotide
  modified_base 15: mod_base = OTHER; note = 2'-O-methyl modified nucleotide
  modified_base 16..17: mod_base = OTHER; note = 2'-deoxy-2'-fluoro modified nucleotide
  modified_base 18..21: mod_base = OTHER; note = 2'-O-methyl modified nucleotide
  source 1..21: mol_type = other RNA
tagaagacgtctttaccgatt

SEQ ID NO: 441 - RNA, 21 nt, synthetic construct
  misc_feature 1..21: note = Synthetic
  misc_feature 1: note = Nucleotide linked to an inverted abasic cap
  modified_base 2..3: mod_base = OTHER; note = 2'-O-methyl modified nucleotide
  modified_base 7..9: mod_base = OTHER; note = 2'-O-methyl modified nucleotide
  modified_base 12: mod_base = OTHER; note = 2'-O-methyl modified nucleotide
  modified_base 16..21: mod_base = OTHER; note = 2'-O-methyl modified nucleotide
  modified_base 20..21: mod_base = OTHER; note = phosphorothioate linkage
  misc_feature 21: note = Nucleotide linked to an inverted abasic cap
  source 1..21: mol_type = other RNA
gttgaactcaataaaccttca

SEQ ID NO: 442 - RNA, 23 nt, synthetic construct
  misc_feature 1..23: note = Synthetic
  modified_base 1..2: mod_base = OTHER; note = 2'-O-methyl modified nucleotide
  modified_base 9: mod_base = OTHER; note = 2'-O-methyl modified nucleotide
  modified_base 18: mod_base = OTHER; note = 2'-O-methyl modified nucleotide
  modified_base 22..23: mod_base = OTHER; note = 2'-O-methyl modified nucleotide
  modified_base 22..23: mod_base = OTHER; note = phosphorothioate linkage
  source 1..23: mol_type = other RNA
gtaaggtttattgagttcaaccc

SEQ ID NO: 443 - DNA, 21 bp, synthetic construct
  misc_feature 1..21: note = Synthetic
  misc_feature 1..19: note = ribonucleotide unmodified or modified as described for this sequence
  misc_feature 1: note = Nucleotide linked to an inverted abasic cap
  modified_base 2: mod_base = OTHER; note = 2'-deoxy-2'-fluoro modified nucleotide
  modified_base 8: mod_base = OTHER; note = 2'-deoxy-2'-fluoro modified nucleotide
  modified_base 10: mod_base = OTHER; note = 2'-deoxy-2'-fluoro modified nucleotide
  modified_base 12..15: mod_base = OTHER; note = 2'-deoxy-2'-fluoro modified nucleotide
  modified_base 19: mod_base = OTHER; note = 2'-deoxy-2'-fluoro modified nucleotide
  misc_feature 21: note = Nucleotide linked to an inverted abasic cap
  source 1..21: mol_type = other DNA
  misc_feature 1: note = DNA
  misc_feature 2: note = RNA
  misc_feature 3..7: note = DNA
  misc_feature 8: note = RNA
  misc_feature 9: note = DNA
  misc_feature 10: note = RNA
  misc_feature 11: note = DNA
  misc_feature 12..15: note = RNA
  misc_feature 16..18: note = DNA
  misc_feature 19: note = RNA
  misc_feature 20..21: note = DNA
gtggaggtatacttcgaattt

SEQ ID NO: 444 - RNA, 21 nt, synthetic construct
  misc_feature 1..21: note = Synthetic
  modified_base 4: mod_base = OTHER; note = 2'-deoxy-2'-fluoro modified nucleotide
  modified_base 5..8: mod_base = OTHER; note = 2'-O-methyl modified nucleotide
  modified_base 9: mod_base = OTHER; note = 2'-deoxy-2'-fluoro modified nucleotide
  modified_base 10: mod_base = OTHER; note = 2'-O-methyl modified nucleotide
  modified_base 11: mod_base = OTHER; note = 2'-deoxy-2'-fluoro modified nucleotide
  modified_base 12: mod_base = OTHER; note = 2'-O-methyl modified nucleotide
  modified_base 13..17: mod_base = OTHER; note = 2'-deoxy-2'-fluoro modified nucleotide
  modified_base 18: mod_base = OTHER; note = 2'-O-methyl modified nucleotide
  modified_base 19: mod_base = OTHER; note = 2'-deoxy-2'-fluoro modified nucleotide
  modified_base 20..21: mod_base = OTHER; note = 2'-O-methyl modified nucleotide
  source 1..21: mol_type = other RNA
attcgaagtatacctccactt

SEQ ID NO: 445 - DNA, 21 bp, synthetic construct
  misc_feature 1..21: note = Synthetic
  misc_feature 1..19: note = ribonucleotide unmodified or modified as described for this sequence
  misc_feature 1: note = Nucleotide linked to an inverted abasic cap
  modified_base 5: mod_base = OTHER; note = 2'-deoxy-2'-fluoro modified nucleotide
  modified_base 7: mod_base = OTHER; note = 2'-deoxy-2'-fluoro modified nucleotide
  modified_base 11..12: mod_base = OTHER; note = 2'-deoxy-2'-fluoro modified nucleotide
  modified_base 17: mod_base = OTHER; note = 2'-deoxy-2'-fluoro modified nucleotide
  misc_feature 21: note = Nucleotide linked to an inverted abasic cap
  source 1..21: mol_type = other DNA
  misc_feature 1..4: note = DNA
  misc_feature 5: note = RNA
  misc_feature 6: note = DNA
  misc_feature 7: note = RNA
  misc_feature 8..10: note = DNA
  misc_feature 11..12: note = RNA
  misc_feature 13..16: note = DNA
  misc_feature 17: note = RNA
  misc_feature 18..21: note = DNA
agagcacgagctaaagtaatt

SEQ ID NO: 446 - RNA, 21 nt, synthetic construct
  misc_feature 1..21: note = Synthetic
  modified_base 4..7: mod_base = OTHER; note = 2'-deoxy-2'-fluoro modified nucleotide
  modified_base 8..9: mod_base = OTHER; note = 2'-O-methyl modified nucleotide
  modified_base 10..12: mod_base = OTHER; note = 2'-deoxy-2'-fluoro modified nucleotide
  modified_base 13: mod_base = OTHER; note = 2'-O-methyl modified nucleotide
  modified_base 14: mod_base = OTHER; note = 2'-deoxy-2'-fluoro modified nucleotide
  modified_base 15: mod_base = OTHER; note = 2'-O-methyl modified nucleotide
  modified_base 16..19: mod_base = OTHER; note = 2'-deoxy-2'-fluoro modified nucleotide
  modified_base 20..21: mod_base = OTHER; note = 2'-O-methyl modified nucleotide
  source 1..21: mol_type = other RNA
ttactttagctcgtgctcttt

SEQ ID NO: 447 - RNA, 21 nt, synthetic construct
  misc_feature 1..21: note = Synthetic
  modified_base 2: mod_base = OTHER; note = 2'-O-methyl modified nucleotide
  modified_base 6..9: mod_base = OTHER; note = 2'-O-methyl modified nucleotide
  modified_base 16: mod_base = OTHER; note = 2'-O-methyl modified nucleotide
  modified_base 18..21: mod_base = OTHER; note = 2'-O-methyl modified nucleotide
  modified_base 20..21: mod_base = OTHER; note = phosphorothioate linkage
  source 1..21: mol_type = other RNA
aaaggctctagaagacgtctt

SEQ ID NO: 448 - RNA, 21 nt, synthetic construct
  misc_feature 1..21: note = Synthetic
  modified_base 9: mod_base = OTHER; note = 2'-O-methyl modified nucleotide
  modified_base 15: mod_base = OTHER; note = 2'-O-methyl modified nucleotide
  modified_base 18: mod_base = OTHER; note = 2'-O-methyl modified nucleotide
  modified_base 20..21: mod_base = OTHER; note = 2'-O-methyl modified nucleotide
  modified_base 20..21: mod_base = OTHER; note = phosphorothioate linkage
  source 1..21: mol_type = other RNA
tttgggttcaatgtcagcatt

SEQ ID NO: 449 - DNA, 21 bp, synthetic construct
  misc_feature 1..21: note = Synthetic
  misc_feature 1..19: note = ribonucleotide unmodified or modified as described for this sequence
  misc_feature 1: note = Nucleotide linked to an inverted abasic cap
  modified_base 8: mod_base = OTHER; note = 2'-deoxy-2'-fluoro modified nucleotide
  modified_base 10: mod_base = OTHER; note = 2'-deoxy-2'-fluoro modified nucleotide
  modified_base 14..15: mod_base = OTHER; note = 2'-deoxy-2'-fluoro modified nucleotide
  misc_feature 21: note = Nucleotide linked to an inverted abasic cap
  source 1..21: mol_type = other DNA
  misc_feature 1..7: note = DNA
  misc_feature 8: note = RNA
  misc_feature 9: note = DNA
  misc_feature 10: note = RNA
  misc_feature 11..13: note = DNA
  misc_feature 14..15: note = RNA
  misc_feature 16..21: note = DNA
gagagagcacgagctaaagtt

SEQ ID NO: 450 - RNA, 21 nt, synthetic construct
  misc_feature 1..21: note = Synthetic
  modified_base 4: mod_base = OTHER; note = 2'-deoxy-2'-fluoro modified nucleotide
  modified_base 5..6: mod_base = OTHER; note = 2'-O-methyl modified nucleotide
  modified_base 7..9: mod_base = OTHER; note = 2'-deoxy-2'-fluoro modified nucleotide
  modified_base 10: mod_base = OTHER; note = 2'-O-methyl modified nucleotide
  modified_base 11: mod_base = OTHER; note = 2'-deoxy-2'-fluoro modified nucleotide
  modified_base 12: mod_base = OTHER; note = 2'-O-methyl modified nucleotide
  modified_base 13..19: mod_base = OTHER; note = 2'-deoxy-2'-fluoro modified nucleotide
  modified_base 20..21: mod_base = OTHER; note = 2'-O-methyl modified nucleotide
  source 1..21: mol_type = other RNA
ctttagctcgtgctctctctt

SEQ ID NO: 451 - DNA, 21 bp, synthetic construct
  misc_feature 1..21: note = Synthetic
  misc_feature 1..19: note = ribonucleotide unmodified or modified as described for this sequence
  misc_feature 1: note = Nucleotide linked to an inverted abasic cap
  modified_base 6..7: mod_base = OTHER; note = 2'-deoxy-2'-fluoro modified nucleotide
  modified_base 11..13: mod_base = OTHER; note = 2'-deoxy-2'-fluoro modified nucleotide
  modified_base 16: mod_base = OTHER; note = 2'-deoxy-2'-fluoro modified nucleotide
  misc_feature 21: note = Nucleotide linked to an inverted abasic cap
  source 1..21: mol_type = other DNA
  misc_feature 1..5: note = DNA
  misc_feature 6..7: note = RNA
  misc_feature 8..10: note = DNA
  misc_feature 11..13: note = RNA
  misc_feature 14..15: note = DNA
  misc_feature 16: note = RNA
  misc_feature 17..21: note = DNA
gagggttgaactcaataaatt

SEQ ID NO: 452 - RNA, 21 nt, synthetic construct
  misc_feature 1..21: note = Synthetic
  modified_base 4: mod_base = OTHER; note = 2'-O-methyl modified nucleotide
  modified_base 5..6: mod_base = OTHER; note = 2'-deoxy-2'-fluoro modified nucleotide
  modified_base 7..9: mod_base = OTHER; note = 2'-O-methyl modified nucleotide
  modified_base 10..12: mod_base = OTHER; note = 2'-deoxy-2'-fluoro modified nucleotide
  modified_base 13: mod_base = OTHER; note = 2'-O-methyl modified nucleotide
  modified_base 15..19: mod_base = OTHER; note = 2'-deoxy-2'-fluoro modified nucleotide
  modified_base 20..21: mod_base = OTHER; note = 2'-O-methyl modified nucleotide
  source 1..21: mol_type = other RNA
tttattgagttcaaccctctt

SEQ ID NO: 453 - DNA, 21 bp, synthetic construct
  misc_feature 1..21: note = Synthetic
  misc_feature 1..19: note = ribonucleotide unmodified or modified as described for this sequence
  misc_feature 1: note = Nucleotide linked to an inverted abasic cap
  modified_base 2..4: mod_base = OTHER; note = 2'-deoxy-2'-fluoro modified nucleotide
  modified_base 8..10: mod_base = OTHER; note = 2'-deoxy-2'-fluoro modified nucleotide
  modified_base 13: mod_base = OTHER; note = 2'-deoxy-2'-fluoro modified nucleotide
  modified_base 17..18: mod_base = OTHER; note = 2'-deoxy-2'-fluoro modified nucleotide
  misc_feature 21: note = Nucleotide linked to an inverted abasic cap
  source 1..21: mol_type = other DNA
  misc_feature 1: note = DNA
  misc_feature 2..4: note = RNA
  misc_feature 5..7: note = DNA
  misc_feature 8..10: note = RNA
  misc_feature 11..12: note = DNA
  misc_feature 13: note = RNA
  misc_feature 14..16: note = DNA
  misc_feature 17..18: note = RNA
  misc_feature 19..21: note = DNA
acccaaatttgatagactgtt

SEQ ID NO: 454 - RNA, 21 nt, synthetic construct
  misc_feature 1..21: note = Synthetic
  modified_base 4..6: mod_base = OTHER; note = 2'-deoxy-2'-fluoro modified nucleotide
  modified_base 7: mod_base = OTHER; note = 2'-O-methyl modified nucleotide
  modified_base 8..9: mod_base = OTHER; note = 2'-deoxy-2'-fluoro modified nucleotide
  modified_base 10..12: mod_base = OTHER; note = 2'-O-methyl modified nucleotide
  modified_base 13..15: mod_base = OTHER; note = 2'-deoxy-2'-fluoro modified nucleotide
  modified_base 16..18: mod_base = OTHER; note = 2'-O-methyl modified nucleotide
  modified_base 19: mod_base = OTHER; note = 2'-deoxy-2'-fluoro modified nucleotide
  modified_base 20..21: mod_base = OTHER; note = 2'-O-methyl modified nucleotide
  source 1..21: mol_type = other RNA
cagtctatcaaatttgggttt

SEQ ID NO: 455 - RNA, 21 nt, synthetic construct
  misc_feature 1..21: note = Synthetic
  modified_base 4..5: mod_base = OTHER; note = 2'-O-methyl modified nucleotide
  modified_base 6..9: mod_base = OTHER; note = 2'-deoxy-2'-fluoro modified nucleotide
  modified_base 10..15: mod_base = OTHER; note = 2'-O-methyl modified nucleotide
  modified_base 16: mod_base = OTHER; note = 2'-deoxy-2'-fluoro modified nucleotide
  modified_base 17: mod_base = OTHER; note = 2'-O-methyl modified nucleotide
  modified_base 18..19: mod_base = OTHER; note = 2'-deoxy-2'-fluoro modified nucleotide
  modified_base 20..21: mod_base = OTHER; note = 2'-O-methyl modified nucleotide
  source 1..21: mol_type = other RNA
aaaggctctagaagacgtctt

SEQ ID NO: 456 - DNA, 21 bp, synthetic construct
  misc_feature 1..21: note = Synthetic
  misc_feature 1..19: note = ribonucleotide unmodified or modified as described for this sequence
  misc_feature 1: note = Nucleotide linked to an inverted abasic cap
  modified_base 2..3: mod_base = OTHER; note = 2'-deoxy-2'-fluoro modified nucleotide
  modified_base 5..7: mod_base = OTHER; note = 2'-deoxy-2'-fluoro modified nucleotide
  modified_base 9..10: mod_base = OTHER; note = 2'-deoxy-2'-fluoro modified nucleotide
  modified_base 12..14: mod_base = OTHER; note = 2'-deoxy-2'-fluoro modified nucleotide
  modified_base 18: mod_base = OTHER; note = 2'-deoxy-2'-fluoro modified nucleotide
  misc_feature 21: note = Nucleotide linked to an inverted abasic cap
  source 1..21: mol_type = other DNA
  misc_feature 1: note = DNA
  misc_feature 2..3: note = RNA
  misc_feature 4: note = DNA
  misc_feature 5..7: note = RNA
  misc_feature 8: note = DNA
  misc_feature 9..10: note = RNA
  misc_feature 11: note = DNA
  misc_feature 12..14: note = RNA
  misc_feature 15..17: note = DNA
  misc_feature 18: note = RNA
  misc_feature 19..21: note = DNA
gttgcttgttatccgggcatt

SEQ ID NO: 457 - RNA, 21 nt, synthetic construct
  misc_feature 1..21: note = Synthetic
  modified_base 4..5: mod_base = OTHER; note = 2'-deoxy-2'-fluoro modified nucleotide
  modified_base 6..8: mod_base = OTHER; note = 2'-O-methyl modified nucleotide
  modified_base 9: mod_base = OTHER; note = 2'-deoxy-2'-fluoro modified nucleotide
  modified_base 10..11: mod_base = OTHER; note = 2'-O-methyl modified nucleotide
  modified_base 12: mod_base = OTHER; note = 2'-deoxy-2'-fluoro modified nucleotide
  modified_base 13: mod_base = OTHER; note = 2'-O-methyl modified nucleotide
  modified_base 15: mod_base = OTHER; note = 2'-O-methyl modified nucleotide
  modified_base 16: mod_base = OTHER; note = 2'-deoxy-2'-fluoro modified nucleotide
  modified_base 17..18: mod_base = OTHER; note = 2'-O-methyl modified nucleotide
  modified_base 19: mod_base = OTHER; note = 2'-deoxy-2'-fluoro modified nucleotide
  modified_base 20..21: mod_base = OTHER; note = 2'-O-methyl modified nucleotide
  source 1..21: mol_type = other RNA
tgcccggataacaagcaactt

SEQ ID NO: 458 - RNA, 21 nt, synthetic construct
  misc_feature 1..21: note = Synthetic
  modified_base 5: mod_base = OTHER; note = 2'-O-methyl modified nucleotide
  modified_base 20..21: mod_base = OTHER; note = 2'-O-methyl modified nucleotide
  modified_base 1..2: mod_base = OTHER; note = phosphorothioate linkage
  modified_base 2..3: mod_base = OTHER; note = phosphorothioate linkage
  modified_base 3..4: mod_base = OTHER; note = phosphorothioate linkage
  source 1..21: mol_type = other RNA
acttcatgagggttgcgactt

SEQ ID NO: 459 - DNA, 21 bp, synthetic construct
  misc_feature 1..21: note = Synthetic
  misc_feature 1..19: note = ribonucleotide unmodified or modified as described for this sequence
  misc_feature 1: note = Nucleotide linked to an inverted abasic cap
  modified_base 4: mod_base = OTHER; note = 2'-deoxy-2'-fluoro modified nucleotide
  modified_base 6: mod_base = OTHER; note = 2'-deoxy-2'-fluoro modified nucleotide
  modified_base 8: mod_base = OTHER; note = 2'-deoxy-2'-fluoro modified nucleotide
  modified_base 11: mod_base = OTHER; note = 2'-deoxy-2'-fluoro modified nucleotide
  modified_base 13: mod_base = OTHER; note = 2'-deoxy-2'-fluoro modified nucleotide
  modified_base 15: mod_base = OTHER; note = 2'-deoxy-2'-fluoro modified nucleotide
  modified_base 17: mod_base = OTHER; note = 2'-deoxy-2'-fluoro modified nucleotide
  modified_base 19: mod_base = OTHER; note = 2'-deoxy-2'-fluoro modified nucleotide
  misc_feature 21: note = Nucleotide linked to an inverted abasic cap
  source 1..21: mol_type = other DNA
  misc_feature 1..3: note = DNA
  misc_feature 4: note = RNA
  misc_feature 5: note = DNA
  misc_feature 6: note = RNA
  misc_feature 7: note = DNA
  misc_feature 8: note = RNA
  misc_feature 9..10: note = DNA
  misc_feature 11: note = RNA
  misc_feature 12: note = DNA
  misc_feature 13: note = RNA
  misc_feature 14: note = DNA
  misc_feature 15: note = RNA
  misc_feature 16: note = DNA
  misc_feature 17: note = RNA
  misc_feature 18: note = DNA
  misc_feature 19: note = RNA
  misc_feature 20..21: note = DNA
agatgtgtgacatgtatattt

SEQ ID NO: 460 - RNA, 21 nt, synthetic construct
  misc_feature 1..21: note = Synthetic
  modified_base 4: mod_base = OTHER; note = 2'-deoxy-2'-fluoro modified nucleotide
  modified_base 5: mod_base = OTHER; note = 2'-O-methyl modified nucleotide
  modified_base 6: mod_base = OTHER; note = 2'-deoxy-2'-fluoro modified nucleotide
  modified_base 7: mod_base = OTHER; note = 2'-O-methyl modified nucleotide
  modified_base 8: mod_base = OTHER; note = 2'-deoxy-2'-fluoro modified nucleotide
  modified_base 9: mod_base = OTHER; note = 2'-O-methyl modified nucleotide
  modified_base 10..11: mod_base = OTHER; note = 2'-deoxy-2'-fluoro modified nucleotide
  modified_base 12: mod_base = OTHER; note = 2'-O-methyl modified nucleotide
  modified_base 13: mod_base = OTHER; note = 2'-deoxy-2'-fluoro modified nucleotide
  modified_base 15: mod_base = OTHER; note = 2'-deoxy-2'-fluoro modified nucleotide
  modified_base 16: mod_base = OTHER; note = 2'-O-methyl modified nucleotide
  modified_base 17..19: mod_base = OTHER; note = 2'-deoxy-2'-fluoro modified nucleotide
  modified_base 20..21: mod_base = OTHER; note = 2'-O-methyl modified nucleotide
  source 1..21: mol_type = other RNA
atatacatgtcacacatcttt

SEQ ID NO: 461 - DNA, 21 bp, synthetic construct
  misc_feature 1..21: note = Synthetic
  misc_feature 1..19: note = ribonucleotide unmodified or modified as described for this sequence
  misc_feature 1: note = Nucleotide linked to an inverted abasic cap
  modified_base 1: mod_base = OTHER; note = 2'-deoxy-2'-fluoro modified nucleotide
  modified_base 3: mod_base = OTHER; note = 2'-deoxy-2'-fluoro modified nucleotide
  modified_base 6: mod_base = OTHER; note = 2'-deoxy-2'-fluoro modified nucleotide
  modified_base 8..10: mod_base = OTHER; note = 2'-deoxy-2'-fluoro modified nucleotide
  modified_base 12: mod_base = OTHER; note = 2'-deoxy-2'-fluoro modified nucleotide
  modified_base 14: mod_base = OTHER; note = 2'-deoxy-2'-fluoro modified nucleotide
  modified_base 17: mod_base = OTHER; note = 2'-deoxy-2'-fluoro modified nucleotide
  misc_feature 21: note = Nucleotide linked to an inverted abasic cap
  source 1..21: mol_type = other DNA
  misc_feature 1: note = RNA
  misc_feature 2: note = DNA
  misc_feature 3: note = RNA
  misc_feature 4..5: note = DNA
  misc_feature 6: note = RNA
  misc_feature 7: note = DNA
  misc_feature 8..10: note = RNA
  misc_feature 11: note = DNA
  misc_feature 12: note = RNA
  misc_feature 13: note = DNA
  misc_feature 14: note = RNA
  misc_feature 15..16: note = DNA
  misc_feature 17: note = RNA
  misc_feature 18..21: note = DNA
cacggcatctgtgtggtggtt

SEQ ID NO: 462 - RNA, 21 nt, synthetic construct
  misc_feature 1..21: note = Synthetic
  modified_base 4..5: mod_base = OTHER; note = 2'-deoxy-2'-fluoro modified nucleotide
  modified_base 6: mod_base = OTHER; note = 2'-O-methyl modified nucleotide
  modified_base 7: mod_base = OTHER; note = 2'-deoxy-2'-fluoro modified nucleotide
  modified_base 8: mod_base = OTHER; note = 2'-O-methyl modified nucleotide
  modified_base 9: mod_base = OTHER; note = 2'-deoxy-2'-fluoro modified nucleotide
  modified_base 10..12: mod_base = OTHER; note = 2'-O-methyl modified nucleotide
  modified_base 13: mod_base = OTHER; note = 2'-deoxy-2'-fluoro modified nucleotide
  modified_base 15..16: mod_base = OTHER; note = 2'-deoxy-2'-fluoro modified nucleotide
  modified_base 17: mod_base = OTHER; note = 2'-O-methyl modified nucleotide
  modified_base 18: mod_base = OTHER; note = 2'-deoxy-2'-fluoro modified nucleotide
  modified_base 19..21: mod_base = OTHER; note = 2'-O-methyl modified nucleotide
  source 1..21: mol_type = other RNA
ccaccacacagatgccgtgtt

SEQ ID NO: 463 - RNA, 21 nt, synthetic construct
  misc_feature 1..21: note = Synthetic
  modified_base 4..6: mod_base = OTHER; note = 2'-deoxy-2'-fluoro modified nucleotide
  modified_base 7: mod_base = OTHER; note = 2'-O-methyl modified nucleotide
  modified_base 8..9: mod_base = OTHER; note = 2'-deoxy-2'-fluoro modified nucleotide
  modified_base 10: mod_base = OTHER; note = 2'-O-methyl modified nucleotide
  modified_base 11: mod_base = OTHER; note = 2'-deoxy-2'-fluoro modified nucleotide
  modified_base 12: mod_base = OTHER; note = 2'-O-methyl modified nucleotide
  modified_base 13: mod_base = OTHER; note = 2'-deoxy-2'-fluoro modified nucleotide
  modified_base 14: mod_base = OTHER; note = 2'-O-methyl modified nucleotide
  modified_base 15: mod_base = OTHER; note = 2'-deoxy-2'-fluoro modified nucleotide
  modified_base 16: mod_base = OTHER; note = 2'-O-methyl modified nucleotide
  modified_base 17: mod_base = OTHER; note = 2'-deoxy-2'-fluoro modified nucleotide
  modified_base 18: mod_base = OTHER; note = 2'-O-methyl modified nucleotide
  modified_base 19: mod_base = OTHER; note = 2'-deoxy-2'-fluoro modified nucleotide
  modified_base 20..21: mod_base = OTHER; note = 2'-O-methyl modified nucleotide
  modified_base 20..21: mod_base = OTHER; note = phosphorothioate linkage
  source 1..21: mol_type = other RNA
ttaagataatatatacatgtt

SEQ ID NO: 464 - RNA, 21 nt, synthetic construct
  misc_feature 1..21: note = Synthetic
  misc_feature 1: note = Nucleotide linked to an inverted abasic cap
  modified_base 20..21: mod_base = OTHER; note = 2'-O-methyl modified nucleotide
  modified_base 20..21: mod_base = OTHER; note = phosphorothioate linkage
  misc_feature 21: note = Nucleotide linked to an inverted abasic cap
  source 1..21: mol_type = other RNA
catgtatatattatcttaatt

SEQ ID NO: 465 - RNA, 21 nt, synthetic construct
  misc_feature 1..21: note = Synthetic
  modified_base 20..21: mod_base = OTHER; note = 2'-O-methyl modified nucleotide
  modified_base 20..21: mod_base = OTHER; note = phosphorothioate linkage
  source 1..21: mol_type = other RNA
ttaagataatatatacatgtt

SEQ ID NO: 466 - RNA, 21 nt, synthetic construct
  misc_feature 1..21: note = Synthetic
  modified_base 5: mod_base = OTHER; note = 2'-O-methyl modified nucleotide
  modified_base 7: mod_base = OTHER; note = 2'-O-methyl modified nucleotide
  modified_base 9: mod_base = OTHER; note = 2'-O-methyl modified nucleotide
  modified_base 11..12: mod_base = OTHER; note = 2'-O-methyl modified nucleotide
  modified_base 16: mod_base = OTHER; note = 2'-O-methyl modified nucleotide
  modified_base 18..21: mod_base = OTHER; note = 2'-O-methyl modified nucleotide
  modified_base 20..21: mod_base = OTHER; note = phosphorothioate linkage
  source 1..21: mol_type = other RNA
tatatacatgtcacacatctt

SEQ ID NO: 467 - RNA, 21 nt, synthetic construct
  misc_feature 1..21: note = Synthetic
  modified_base 9: mod_base = OTHER; note = 2'-O-methyl modified nucleotide
  modified_base 15: mod_base = OTHER; note = 2'-O-methyl modified nucleotide
  modified_base 18: mod_base = OTHER; note = 2'-O-methyl modified nucleotide
  modified_base 20..21: mod_base = OTHER; note = 2'-O-methyl modified nucleotide
  modified_base 1..2: mod_base = OTHER; note = phosphorothioate linkage
  modified_base 2..3: mod_base = OTHER; note = phosphorothioate linkage
  modified_base 3..4: mod_base = OTHER; note = phosphorothioate linkage
  modified_base 20..21: mod_base = OTHER; note = phosphorothioate linkage
  source 1..21: mol_type = other RNA
tttgggttcaatgtcagcatt

SEQ ID NO: 468 - DNA, 21 bp, synthetic construct
  misc_feature 1..21: note = Synthetic
  misc_feature 1..19: note = ribonucleotide unmodified or modified as described for this sequence
  misc_feature 1: note = Nucleotide linked to an inverted abasic cap
  modified_base 2: mod_base = OTHER; note = 2'-deoxy-2'-fluoro modified nucleotide
  modified_base 4: mod_base = OTHER; note = 2'-deoxy-2'-fluoro modified nucleotide
  modified_base 7: mod_base = OTHER; note = 2'-deoxy-2'-fluoro modified nucleotide
  modified_base 10..11: mod_base = OTHER; note = 2'-deoxy-2'-fluoro modified nucleotide
  modified_base 13..15: mod_base = OTHER; note = 2'-deoxy-2'-fluoro modified nucleotide
  modified_base 18: mod_base = OTHER; note = 2'-deoxy-2'-fluoro modified nucleotide
  misc_feature 21: note = Nucleotide linked to an inverted abasic cap
  source 1..21: mol_type = other DNA
  misc_feature 1: note = DNA
  misc_feature 2: note = RNA
  misc_feature 3: note = DNA
  misc_feature 4: note = RNA
  misc_feature 5..6: note = DNA
  misc_feature 7: note = RNA
  misc_feature 8..9: note = DNA
  misc_feature 10..11: note = RNA
  misc_feature 12: note = DNA
  misc_feature 13..15: note = RNA
  misc_feature 16..17: note = DNA
  misc_feature 18: note = RNA
  misc_feature 19..21: note = DNA
acgcaataactgtttggtatt

SEQ ID NO: 469 - RNA, 21 nt, synthetic construct
  misc_feature 1..21: note = Synthetic
  modified_base 4: mod_base = OTHER; note = 2'-deoxy-2'-fluoro modified nucleotide
  modified_base 5..7: mod_base = OTHER; note = 2'-O-methyl modified nucleotide
  modified_base 8: mod_base = OTHER; note = 2'-deoxy-2'-fluoro modified nucleotide
  modified_base 9..10: mod_base = OTHER; note = 2'-O-methyl modified nucleotide
  modified_base 11..12: mod_base = OTHER; note = 2'-deoxy-2'-fluoro modified nucleotide
  modified_base 13: mod_base = OTHER; note = 2'-O-methyl modified nucleotide
  modified_base 14..15: mod_base = OTHER; note = 2'-deoxy-2'-fluoro modified nucleotide
  modified_base 16: mod_base = OTHER; note = 2'-O-methyl modified nucleotide
  modified_base 17: mod_base = OTHER; note = 2'-deoxy-2'-fluoro modified nucleotide
  modified_base 18: mod_base = OTHER; note = 2'-O-methyl modified nucleotide
  modified_base 19: mod_base = OTHER; note = 2'-deoxy-2'-fluoro modified nucleotide
  modified_base 20..21: mod_base = OTHER; note = 2'-O-methyl modified nucleotide
  source 1..21: mol_type = other RNA
taccaaacagttattgcgttt

SEQ ID NO: 470 - DNA, 21 bp, synthetic construct
  misc_feature 1..21: note = Synthetic
  misc_feature 1..19: note = ribonucleotide unmodified or modified as described for this sequence
  misc_feature 1: note = Nucleotide linked to an inverted abasic cap
  modified_base 2: mod_base = OTHER; note = 2'-deoxy-2'-fluoro modified nucleotide
  modified_base 5: mod_base = OTHER; note = 2'-deoxy-2'-fluoro modified nucleotide
  modified_base 7: mod_base = OTHER; note = 2'-deoxy-2'-fluoro modified nucleotide
  modified_base 9: mod_base = OTHER; note = 2'-deoxy-2'-fluoro modified nucleotide
  modified_base 11: mod_base = OTHER; note = 2'-deoxy-2'-fluoro modified nucleotide
  modified_base 13: mod_base = OTHER; note = 2'-deoxy-2'-fluoro modified nucleotide
  modified_base 15..16: mod_base = OTHER; note = 2'-deoxy-2'-fluoro modified nucleotide
  modified_base 18..19: mod_base = OTHER; note = 2'-deoxy-2'-fluoro modified nucleotide
  misc_feature 21: note = Nucleotide linked to an inverted abasic cap
  source 1..21: mol_type = other DNA
  misc_feature 1: note = DNA
  misc_feature 2: note = RNA
  misc_feature 3..4: note = DNA
  misc_feature 5: note = RNA
  misc_feature 6: note = DNA
  misc_feature 7: note = RNA
  misc_feature 8: note = DNA
  misc_feature 9: note = RNA
  misc_feature 10: note = DNA
  misc_feature 11: note = RNA
  misc_feature 12: note = DNA
  misc_feature 13: note = RNA
  misc_feature 14: note = DNA
  misc_feature 15..16: note = RNA
  misc_feature 17: note = DNA
  misc_feature 18..19: note = RNA
  misc_feature 20..21: note = DNA
gtgacatgtatatattatctt

SEQ ID NO: 471 - RNA, 21 nt, synthetic construct
  misc_feature 1..21: note = Synthetic
  modified_base 4..5: mod_base = OTHER; note = 2'-O-methyl modified nucleotide
  modified_base 6: mod_base = OTHER; note = 2'-deoxy-2'-fluoro modified nucleotide
  modified_base 7: mod_base = OTHER; note = 2'-O-methyl modified nucleotide
  modified_base 8: mod_base = OTHER; note = 2'-deoxy-2'-fluoro modified nucleotide
  modified_base 9: mod_base = OTHER; note = 2'-O-methyl modified nucleotide
  modified_base 10: mod_base = OTHER; note = 2'-deoxy-2'-fluoro modified nucleotide
  modified_base 11: mod_base = OTHER; note = 2'-O-methyl modified nucleotide
  modified_base 12: mod_base = OTHER; note = 2'-deoxy-2'-fluoro modified nucleotide
  modified_base 13: mod_base = OTHER; note = 2'-O-methyl modified nucleotide
  modified_base 14: mod_base = OTHER; note = 2'-deoxy-2'-fluoro modified nucleotide
  modified_base 15: mod_base = OTHER; note = 2'-O-methyl modified nucleotide
  modified_base 16..17: mod_base = OTHER; note = 2'-deoxy-2'-fluoro modified nucleotide
  modified_base 18: mod_base = OTHER; note = 2'-O-methyl modified nucleotide
  modified_base 19: mod_base = OTHER; note = 2'-deoxy-2'-fluoro modified nucleotide
  modified_base 20..21: mod_base = OTHER; note = 2'-O-methyl modified nucleotide
  source 1..21: mol_type = other RNA
gataatatatacatgtcactt

SEQ ID NO: 472 - DNA, 21 bp, synthetic construct
  misc_feature 1..21: note = Synthetic
  misc_feature 1..19: note = ribonucleotide unmodified or modified as described for this sequence
  misc_feature 1: note = Nucleotide linked to an inverted abasic cap
  modified_base 2: mod_base = OTHER; note = 2'-deoxy-2'-fluoro modified nucleotide
  modified_base 6: mod_base = OTHER; note = 2'-deoxy-2'-fluoro modified nucleotide
  modified_base 8..11: mod_base = OTHER; note = 2'-deoxy-2'-fluoro modified nucleotide
  modified_base 13: mod_base = OTHER; note = 2'-deoxy-2'-fluoro modified nucleotide
  modified_base 15: mod_base = OTHER; note = 2'-deoxy-2'-fluoro modified nucleotide
  misc_feature 21: note = Nucleotide linked to an inverted abasic cap
  source 1..21: mol_type = other DNA
  misc_feature 1: note = DNA
  misc_feature 2: note = RNA
  misc_feature 3..5: note = DNA
  misc_feature 6: note = RNA
  misc_feature 7: note = DNA
  misc_feature 8..11: note = RNA
  misc_feature 12: note = DNA
  misc_feature 13: note = RNA
  misc_feature 14: note = DNA
  misc_feature 15: note = RNA
  misc_feature 16..21: note = DNA
ataagtgccctgtgtagaatt

SEQ ID NO: 473 - RNA, 21 nt, synthetic construct
  misc_feature 1..21: note = Synthetic
  modified_base 4: mod_base = OTHER; note = 2'-deoxy-2'-fluoro modified nucleotide
  modified_base 5: mod_base = OTHER; note = 2'-O-methyl modified nucleotide
  modified_base 6: mod_base = OTHER; note = 2'-deoxy-2'-fluoro modified nucleotide
  modified_base 7: mod_base = OTHER; note = 2'-O-methyl modified nucleotide
  modified_base 8: mod_base = OTHER; note = 2'-deoxy-2'-fluoro modified nucleotide
  modified_base 9..12: mod_base = OTHER; note = 2'-O-methyl modified nucleotide
  modified_base 13: mod_base = OTHER; note = 2'-deoxy-2'-fluoro modified nucleotide
  modified_base 15..17: mod_base = OTHER; note = 2'-deoxy-2'-fluoro modified nucleotide
  modified_base 18: mod_base = OTHER; note = 2'-O-methyl modified nucleotide
  modified_base 19: mod_base = OTHER; note = 2'-deoxy-2'-fluoro modified nucleotide
  modified_base 20..21: mod_base = OTHER; note = 2'-O-methyl modified nucleotide
  source 1..21: mol_type = other RNA
ttctacacagggcacttattt

SEQ ID NO: 474 - RNA, 21 nt, synthetic construct
  misc_feature 1..21: note = Synthetic
  modified_base 2: mod_base = OTHER; note = 2'-O-methyl modified nucleotide
  modified_base 5..7: mod_base = OTHER; note = 2'-O-methyl modified nucleotide
  modified_base 9..10: mod_base = OTHER; note = 2'-O-methyl modified nucleotide
  modified_base 15..16: mod_base = OTHER; note = 2'-O-methyl modified nucleotide
  modified_base 19..21: mod_base = OTHER; note = 2'-O-methyl modified nucleotide
  modified_base 20..21: mod_base = OTHER; note = phosphorothioate linkage
  source 1..21: mol_type = other RNA
aaggtttattgagttcaactt

SEQ ID NO: 475 - DNA, 21 bp, synthetic construct
  misc_feature 1..21: note = Synthetic
  misc_feature 1..19: note = ribonucleotide unmodified or modified as described for this sequence
  misc_feature 1: note = Nucleotide linked to an inverted abasic cap
  modified_base 1: mod_base = OTHER; note = 2'-deoxy-2'-fluoro modified nucleotide
  modified_base 3: mod_base = OTHER; note = 2'-deoxy-2'-fluoro modified nucleotide
  modified_base 5..6: mod_base = OTHER; note = 2'-deoxy-2'-fluoro modified nucleotide
  modified_base 8: mod_base = OTHER; note = 2'-deoxy-2'-fluoro modified nucleotide
  modified_base 10: mod_base = OTHER; note = 2'-deoxy-2'-fluoro modified nucleotide
  modified_base 12: mod_base = OTHER; note = 2'-deoxy-2'-fluoro modified nucleotide
  modified_base 16: mod_base = OTHER; note = 2'-deoxy-2'-fluoro modified nucleotide
  misc_feature 21: note = Nucleotide linked to an inverted abasic cap
  source 1..21: mol_type = other DNA
  misc_feature 1: note = RNA
  misc_feature 2: note = DNA
  misc_feature 3: note = RNA
  misc_feature 4: note = DNA
  misc_feature 5..6: note = RNA
  misc_feature 7: note = DNA
  misc_feature 8: note = RNA
  misc_feature 9: note = DNA
  misc_feature 10: note = RNA
  misc_feature 11: note = DNA
  misc_feature 12: note = RNA
  misc_feature 13..15: note = DNA
  misc_feature 16: note = RNA
  misc_feature 17..21: note = DNA
cgtgccgtgcatgaacaagtt

SEQ ID NO: 476 - RNA, 21 nt, synthetic construct
  misc_feature 1..21: note = Synthetic
  modified_base 4: mod_base = OTHER; note = 2'-O-methyl modified nucleotide
  modified_base 5..7: mod_base = OTHER; note = 2'-deoxy-2'-fluoro modified nucleotide
  modified_base 8: mod_base = OTHER; note = 2'-O-methyl modified nucleotide
  modified_base 9: mod_base = OTHER; note = 2'-deoxy-2'-fluoro modified nucleotide
  modified_base 10: mod_base = OTHER; note = 2'-O-methyl modified nucleotide
  modified_base 11: mod_base = OTHER; note = 2'-deoxy-2'-fluoro modified nucleotide
  modified_base 12: mod_base = OTHER; note = 2'-O-methyl modified nucleotide
  modified_base 13: mod_base = OTHER; note = 2'-deoxy-2'-fluoro modified nucleotide
  modified_base 15: mod_base = OTHER; note = 2'-O-methyl modified nucleotide
  modified_base 16: mod_base = OTHER; note = 2'-deoxy-2'-fluoro modified nucleotide
  modified_base 17: mod_base = OTHER; note = 2'-O-methyl modified nucleotide
  modified_base 18: mod_base = OTHER; note = 2'-deoxy-2'-fluoro modified nucleotide
  modified_base 19..21: mod_base = OTHER; note = 2'-O-methyl modified nucleotide
  source 1..21: mol_type = other RNA
cttgttcatgcacggcacgtt

SEQ ID NO: 477 - DNA, 21 bp, synthetic construct
  misc_feature 1..21: note = Synthetic
  misc_feature 1..19: note = ribonucleotide unmodified or modified as described for this sequence
  misc_feature 1: note = Nucleotide linked to an inverted abasic cap
  modified_base 1..2: mod_base = OTHER; note = 2'-deoxy-2'-fluoro modified nucleotide
  modified_base 7: mod_base = OTHER; note = 2'-deoxy-2'-fluoro modified nucleotide
  modified_base 12: mod_base = OTHER; note = 2'-deoxy-2'-fluoro modified nucleotide
  modified_base 14..16: mod_base = OTHER; note = 2'-deoxy-2'-fluoro modified nucleotide
  modified_base 19: mod_base = OTHER; note = 2'-deoxy-2'-fluoro modified nucleotide
  misc_feature 21: note = Nucleotide linked to an inverted abasic cap
  source 1..21: mol_type = other DNA
  misc_feature 1..2: note = RNA
  misc_feature 3..6: note = DNA
  misc_feature 7: note = RNA
  misc_feature 8..11: note = DNA
  misc_feature 12: note = RNA
  misc_feature 13: note = DNA
  misc_feature 14..16: note = RNA
  misc_feature 17..18: note = DNA
  misc_feature 19: note = RNA
  misc_feature 20..21: note = DNA
ctaaagtaaaatatctaactt

SEQ ID NO: 478 - RNA, 21 nt, synthetic construct
  misc_feature 1..21: note = Synthetic
  modified_base 4..6: mod_base = OTHER; note = 2'-O-methyl modified nucleotide
  modified_base 7: mod_base = OTHER; note = 2'-deoxy-2'-fluoro modified nucleotide
  modified_base 8: mod_base = OTHER; note = 2'-O-methyl modified nucleotide
  modified_base 9..12: mod_base = OTHER; note = 2'-deoxy-2'-fluoro modified nucleotide
  modified_base 13: mod_base = OTHER; note = 2'-O-methyl modified nucleotide
  modified_base 14..17: mod_base = OTHER; note = 2'-deoxy-2'-fluoro modified nucleotide
  modified_base 18..21: mod_base = OTHER; note = 2'-O-methyl modified nucleotide
  source 1..21: mol_type = other RNA
gttagatattttactttagtt

SEQ ID NO: 479 - DNA, 21 bp, synthetic construct
  misc_feature 1..21: note = Synthetic
  misc_feature 1..19: note = ribonucleotide unmodified or modified as described for this sequence
  misc_feature 1: note = Nucleotide linked to an inverted abasic cap
  modified_base 2: mod_base = OTHER; note = 2'-deoxy-2'-fluoro modified nucleotide
  modified_base 10: mod_base = OTHER; note = 2'-deoxy-2'-fluoro modified nucleotide
  modified_base 12: mod_base = OTHER; note = 2'-deoxy-2'-fluoro modified nucleotide
  modified_base 16..17: mod_base = OTHER; note = 2'-deoxy-2'-fluoro modified nucleotide
  misc_feature 21: note = Nucleotide linked to an inverted abasic cap
  source 1..21: mol_type = other DNA
  misc_feature 1: note = DNA
  misc_feature 2: note = RNA
  misc_feature 3..9: note = DNA
  misc_feature 10: note = RNA
  misc_feature 11: note = DNA
  misc_feature 12: note = RNA
  misc_feature 13..15: note = DNA
  misc_feature 16..17: note = RNA
  misc_feature 18..21: note = DNA
atgagagagcacgagctaatt

SEQ ID NO: 480 - RNA, 21 nt, synthetic construct
  misc_feature 1..21: note = Synthetic
  modified_base 4: mod_base = OTHER; note = 2'-O-methyl modified nucleotide
  modified_base 5..7: mod_base = OTHER; note = 2'-deoxy-2'-fluoro modified nucleotide
  modified_base 8: mod_base = OTHER; note = 2'-O-methyl modified nucleotide
  modified_base 9: mod_base = OTHER; note = 2'-deoxy-2'-fluoro modified nucleotide
  modified_base 10: mod_base = OTHER; note = 2'-O-methyl modified nucleotide
  modified_base 11..17: mod_base = OTHER; note = 2'-deoxy-2'-fluoro modified nucleotide
  modified_base 18: mod_base = OTHER; note = 2'-O-methyl modified nucleotide
  modified_base 19: mod_base = OTHER; note = 2'-deoxy-2'-fluoro modified nucleotide
  modified_base 20..21: mod_base = OTHER; note = 2'-O-methyl modified nucleotide
  source 1..21: mol_type = other RNA
ttagctcgtgctctctcattt

SEQ ID NO: 481 - RNA, 21 nt, synthetic construct
  misc_feature 1..21: note = Synthetic
  modified_base 5..7: mod_base = OTHER; note = 2'-O-methyl modified nucleotide
  modified_base 9..10: mod_base = OTHER; note = 2'-O-methyl modified nucleotide
  modified_base 15..16: mod_base = OTHER; note = 2'-O-methyl modified nucleotide
  modified_base 19..21: mod_base = OTHER; note = 2'-O-methyl modified nucleotide
  modified_base 20..21: mod_base = OTHER; note = phosphorothioate linkage
  source 1..21: mol_type = other RNA
aaggtttattgagttcaactt

SEQ ID NO: 482 - DNA, 21 bp, synthetic construct
  misc_feature 1..21: note = Synthetic
  misc_feature 1..19: note = ribonucleotide unmodified or modified as described for this sequence
  misc_feature 1: note = Nucleotide linked to an inverted abasic cap
  modified_base 3: mod_base = OTHER; note = 2'-deoxy-2'-fluoro modified nucleotide
  modified_base 5..8: mod_base = OTHER; note = 2'-deoxy-2'-fluoro modified nucleotide
  modified_base 10: mod_base = OTHER; note = 2'-deoxy-2'-fluoro modified nucleotide
  modified_base 12: mod_base = OTHER; note = 2'-deoxy-2'-fluoro modified nucleotide
  modified_base 17..19: mod_base = OTHER; note = 2'-deoxy-2'-fluoro modified nucleotide
  misc_feature 21: note = Nucleotide linked to an inverted abasic cap
  source 1..21: mol_type = other DNA
  misc_feature 1..2: note = DNA
  misc_feature 3: note = RNA
  misc_feature 4: note = DNA
  misc_feature 5..8: note = RNA
  misc_feature 9: note = DNA
  misc_feature 10: note = RNA
  misc_feature 11: note = DNA
  misc_feature 12: note = RNA
  misc_feature 13..16: note = DNA
  misc_feature 17..19: note = RNA
  misc_feature 20..21: note = DNA
agtgccctgtgtagaattttt

SEQ ID NO: 483 - RNA, 21 nt, synthetic construct
  misc_feature 1..21: note = Synthetic
  modified_base 4..7: mod_base = OTHER; note = 2'-deoxy-2'-fluoro modified nucleotide
  modified_base 8: mod_base = OTHER; note = 2'-O-methyl modified nucleotide
  modified_base 9: mod_base = OTHER; note = 2'-deoxy-2'-fluoro modified nucleotide
  modified_base 10: mod_base = OTHER; note = 2'-O-methyl modified nucleotide
  modified_base 11: mod_base = OTHER; note = 2'-deoxy-2'-fluoro modified nucleotide
  modified_base 12..13: mod_base = OTHER; note = 2'-O-methyl modified nucleotide
  modified_base 15: mod_base = OTHER; note = 2'-O-methyl modified nucleotide
  modified_base 16: mod_base = OTHER; note = 2'-deoxy-2'-fluoro modified nucleotide
  modified_base 17: mod_base = OTHER; note = 2'-O-methyl modified nucleotide
  modified_base 18..19: mod_base = OTHER; note = 2'-deoxy-2'-fluoro modified nucleotide
  modified_base 20..21: mod_base = OTHER; note = 2'-O-methyl modified nucleotide
  source 1..21: mol_type = other RNA
aaattctacacagggcacttt

SEQ ID NO: 484 - DNA, 21 bp, synthetic construct
  misc_feature 1..21: note = Synthetic
  misc_feature 1..19: note = ribonucleotide unmodified or modified as described for this sequence
  misc_feature 1: note = Nucleotide linked to an inverted abasic cap
  modified_base 3: mod_base = OTHER; note = 2'-deoxy-2'-fluoro modified nucleotide
  modified_base 6: mod_base = OTHER; note = 2'-deoxy-2'-fluoro modified nucleotide
  modified_base 11: mod_base = OTHER; note = 2'-deoxy-2'-fluoro modified nucleotide
  modified_base 15..16: mod_base = OTHER; note = 2'-deoxy-2'-fluoro modified nucleotide
  modified_base 18: mod_base = OTHER; note = 2'-deoxy-2'-fluoro modified nucleotide
  misc_feature 21: note = Nucleotide linked to an inverted abasic cap
  source 1..21: mol_type = other DNA
  misc_feature 1..2: note = DNA
  misc_feature 3: note = RNA
  misc_feature 4..5: note = DNA
  misc_feature 6: note = RNA
  misc_feature 7..10: note = DNA
  misc_feature 11: note = RNA
  misc_feature 12..14: note = DNA
  misc_feature 15..16: note = RNA
  misc_feature 17: note = DNA
  misc_feature 18: note = RNA
  misc_feature 19..21: note = DNA
ggcaatggaacgggttatgtt

SEQ ID NO: 485 - RNA, 21 nt, synthetic construct
  misc_feature 1..21: note = Synthetic
  modified_base 4..5: mod_base = OTHER; note = 2'-O-methyl modified nucleotide
  modified_base 6..8: mod_base = OTHER; note = 2'-deoxy-2'-fluoro modified nucleotide
  modified_base 9: mod_base = OTHER; note = 2'-O-methyl modified nucleotide
  modified_base 10..13: mod_base = OTHER; note = 2'-deoxy-2'-fluoro modified nucleotide
  modified_base 15..16: mod_base = OTHER; note = 2'-deoxy-2'-fluoro modified nucleotide
  modified_base 17: mod_base = OTHER; note = 2'-O-methyl modified nucleotide
  modified_base 18..19: mod_base = OTHER; note = 2'-deoxy-2'-fluoro modified nucleotide
  modified_base 20..21: mod_base = OTHER; note = 2'-O-methyl modified nucleotide
  source 1..21: mol_type = other RNA
cataacccgttccattgcctt

SEQ ID NO: 486 - DNA, 21 bp, synthetic construct
  misc_feature 1..21: note = Synthetic
  misc_feature 1..19: note = ribonucleotide unmodified or modified as described for this sequence
  misc_feature 1: note = Nucleotide linked to an inverted abasic cap
  modified_base 2: mod_base = OTHER; note = 2'-deoxy-2'-fluoro modified nucleotide
  modified_base 4: mod_base = OTHER; note = 2'-deoxy-2'-fluoro modified nucleotide
  modified_base 6: mod_base = OTHER; note = 2'-deoxy-2'-fluoro modified nucleotide
  modified_base 8: mod_base = OTHER; note = 2'-deoxy-2'-fluoro modified nucleotide
  modified_base 10..11: mod_base = OTHER; note = 2'-deoxy-2'-fluoro modified nucleotide
  modified_base 13..16: mod_base = OTHER; note = 2'-deoxy-2'-fluoro modified nucleotide
  modified_base 19: mod_base = OTHER; note = 2'-deoxy-2'-fluoro modified nucleotide
  misc_feature 21: note = Nucleotide linked to an inverted abasic cap
  source 1..21: mol_type = other DNA
  misc_feature 1: note = DNA
  misc_feature 2: note = RNA
  misc_feature 3: note = DNA
  misc_feature 4: note = RNA
  misc_feature 5: note = DNA
  misc_feature 6: note = RNA
  misc_feature 7: note = DNA
  misc_feature 8: note = RNA
  misc_feature 9: note = DNA
  misc_feature 10..11: note = RNA
  misc_feature 12: note = DNA
  misc_feature 13..16: note = RNA
  misc_feature 17..18: note = DNA
  misc_feature 19: note = RNA
  misc_feature 20..21: note = DNA
atgtatatattatcttaattt

SEQ ID NO: 487 - RNA, 21 nt, synthetic construct
  misc_feature 1..21: note = Synthetic
  modified_base 4..7: mod_base = OTHER; note = 2'-O-methyl modified nucleotide
  modified_base 8: mod_base = OTHER; note = 2'-deoxy-2'-fluoro modified nucleotide
  modified_base 9..10: mod_base = OTHER; note = 2'-O-methyl modified nucleotide
  modified_base 11: mod_base = OTHER; note = 2'-deoxy-2'-fluoro modified nucleotide
  modified_base 12: mod_base = OTHER; note = 2'-O-methyl modified nucleotide
  modified_base 13: mod_base = OTHER; note = 2'-deoxy-2'-fluoro modified nucleotide
  modified_base 15: mod_base = OTHER; note = 2'-deoxy-2'-fluoro modified nucleotide
  modified_base 16: mod_base = OTHER; note = 2'-O-methyl modified nucleotide
  modified_base 17: mod_base = OTHER; note = 2'-deoxy-2'-fluoro modified nucleotide
  modified_base 18: mod_base = OTHER; note = 2'-O-methyl modified nucleotide
  modified_base 19: mod_base = OTHER; note = 2'-deoxy-2'-fluoro modified nucleotide
  modified_base 20..21: mod_base = OTHER; note = 2'-O-methyl modified nucleotide
  source 1..21: mol_type = other RNA
attaagataatatatacattt

SEQ ID NO: 488 - DNA, 21 bp, synthetic construct
  misc_feature 1..21: note = Synthetic
  misc_feature 1..19: note = ribonucleotide unmodified or modified as described for this sequence
  misc_feature 1: note = Nucleotide linked to an inverted abasic cap
  modified_base 3: mod_base = OTHER; note = 2'-deoxy-2'-fluoro modified nucleotide
  modified_base 5: mod_base = OTHER; note = 2'-deoxy-2'-fluoro modified nucleotide
  modified_base 7..8: mod_base = OTHER; note = 2'-deoxy-2'-fluoro modified nucleotide
  modified_base 10: mod_base = OTHER; note = 2'-deoxy-2'-fluoro modified nucleotide
  modified_base 12..13: mod_base = OTHER; note = 2'-deoxy-2'-fluoro modified nucleotide
  modified_base 15: mod_base = OTHER; note = 2'-deoxy-2'-fluoro modified nucleotide
  modified_base 17: mod_base = OTHER; note = 2'-deoxy-2'-fluoro modified nucleotide
  modified_base 19: mod_base = OTHER; note = 2'-deoxy-2'-fluoro modified nucleotide
  misc_feature 21: note = Nucleotide linked to an inverted abasic cap
  source 1..21: mol_type = other DNA
  misc_feature 1..2: note = DNA
  misc_feature 3: note = RNA
  misc_feature 4: note = DNA
  misc_feature 5: note = RNA
  misc_feature 6: note = DNA
  misc_feature 7..8: note = RNA
  misc_feature 9: note = DNA
  misc_feature 10: note = RNA
  misc_feature 11: note = DNA
  misc_feature 12..13: note = RNA
  misc_feature 14: note = DNA
  misc_feature 15: note = RNA
  misc_feature 16: note = DNA
  misc_feature 17: note = RNA
  misc_feature 18: note = DNA
  misc_feature 19: note = RNA
  misc_feature 20..21: note = DNA
agtacatcgtgccgtgcattt

SEQ ID NO: 489 - RNA, 21 nt, synthetic construct
  misc_feature 1..21: note = Synthetic
  modified_base 4: mod_base = OTHER; note = 2'-deoxy-2'-fluoro modified nucleotide
  modified_base 5: mod_base = OTHER; note = 2'-O-methyl modified nucleotide
  modified_base 6: mod_base = OTHER; note = 2'-deoxy-2'-fluoro modified nucleotide
  modified_base 7..8: mod_base = OTHER; note = 2'-O-methyl modified nucleotide
  modified_base 9: mod_base = OTHER; note = 2'-deoxy-2'-fluoro modified nucleotide
  modified_base 10: mod_base = OTHER; note = 2'-O-methyl modified nucleotide
  modified_base 11: mod_base = OTHER; note = 2'-deoxy-2'-fluoro modified nucleotide
  modified_base 12..13: mod_base = OTHER; note = 2'-O-methyl modified nucleotide
  modified_base 14: mod_base = OTHER; note = 2'-deoxy-2'-fluoro modified nucleotide
  modified_base 15: mod_base = OTHER; note = 2'-O-methyl modified nucleotide
  modified_base 16: mod_base = OTHER; note = 2'-deoxy-2'-fluoro modified nucleotide
  modified_base 17: mod_base = OTHER; note = 2'-O-methyl modified nucleotide
  modified_base 18..19: mod_base = OTHER; note = 2'-deoxy-2'-fluoro modified nucleotide
  modified_base 20..21: mod_base = OTHER; note = 2'-O-methyl modified nucleotide
  source 1..21: mol_type = other RNA
atgcacggcacgatgtacttt

SEQ ID NO: 490 - RNA, 21 nt, synthetic construct
  misc_feature 1..21: note = Synthetic
  misc_feature 1: note = Nucleotide linked to an inverted abasic cap
  modified_base 3: mod_base = OTHER; note = 2'-O-methyl modified nucleotide
  modified_base 5..10: mod_base = OTHER; note = 2'-O-methyl modified nucleotide
  modified_base 15..21: mod_base = OTHER; note = 2'-O-methyl modified nucleotide
  modified_base 20..21: mod_base = OTHER; note = phosphorothioate linkage
  misc_feature 21: note = Nucleotide linked to an inverted abasic cap
  source 1..21: mol_type = other RNA
gacgtcttctagagcctttga

SEQ ID NO: 491 - RNA, 23 nt, synthetic construct
  misc_feature 1..23: note = Synthetic
  modified_base 1..2: mod_base = OTHER; note = 2'-O-methyl modified nucleotide
  modified_base 11: mod_base = OTHER; note = 2'-O-methyl modified nucleotide
  modified_base 22..23: mod_base = OTHER; note = 2'-O-methyl modified nucleotide
  source 1..23: mol_type = other RNA
tcaaaggctctagaagacgtctt

SEQ ID NO: 492 - DNA, 21 bp, synthetic construct
  misc_feature 1..21: note = Synthetic
  misc_feature 1..19: note = ribonucleotide unmodified or modified as described for this sequence
  misc_feature 1: note = Nucleotide linked to an inverted abasic cap
  modified_base 1: mod_base = OTHER; note = 2'-deoxy-2'-fluoro modified nucleotide
  modified_base 6: mod_base = OTHER; note = 2'-deoxy-2'-fluoro modified nucleotide
  modified_base 9: mod_base = OTHER; note = 2'-deoxy-2'-fluoro modified nucleotide
  modified_base 11..12: mod_base = OTHER; note = 2'-deoxy-2'-fluoro modified nucleotide
  modified_base 15..17: mod_base = OTHER; note = 2'-deoxy-2'-fluoro modified nucleotide
  modified_base 19: mod_base = OTHER; note = 2'-deoxy-2'-fluoro modified nucleotide
  misc_feature 21: note = Nucleotide linked to an inverted abasic cap
  source 1..21: mol_type = other DNA
  misc_feature 1: note = RNA
  misc_feature 2..5: note = DNA
  misc_feature 6: note = RNA
  misc_feature 7..8: note = DNA
  misc_feature 9: note = RNA
  misc_feature 10: note = DNA
  misc_feature 11..12: note = RNA
  misc_feature 13..14: note = DNA
  misc_feature 15..17: note = RNA
  misc_feature 18: note = DNA
  misc_feature 19: note = RNA
  misc_feature 20..21: note = DNA
caaaataacatcaatctattt

SEQ ID NO: 493 - RNA, 21 nt, synthetic construct
  misc_feature 1..21: note = Synthetic
  modified_base 4..5: mod_base = OTHER; note = 2'-O-methyl modified nucleotide
  modified_base 6..7: mod_base = OTHER; note = 2'-deoxy-2'-fluoro modified nucleotide
  modified_base 8..9: mod_base = OTHER; note = 2'-O-methyl modified nucleotide
  modified_base 10: mod_base = OTHER; note = 2'-deoxy-2'-fluoro modified nucleotide
  modified_base 11: mod_base = OTHER; note = 2'-O-methyl modified nucleotide
  modified_base 12..13: mod_base = OTHER; note = 2'-deoxy-2'-fluoro modified nucleotide
  modified_base 15..18: mod_base = OTHER; note = 2'-deoxy-2'-fluoro modified nucleotide
  modified_base 19..21: mod_base = OTHER; note = 2'-O-methyl modified nucleotide
  source 1..21: mol_type = other RNA
atagattgatgttattttgtt

SEQ ID NO: 494 - DNA, 21 bp, synthetic construct
  misc_feature 1..21: note = Synthetic
  misc_feature 1..19: note = ribonucleotide unmodified or modified as described for this sequence
  misc_feature 1: note = Nucleotide linked to an inverted abasic cap
  modified_base 2..3: mod_base = OTHER; note = 2'-deoxy-2'-fluoro modified nucleotide
  modified_base 5..6: mod_base = OTHER; note = 2'-deoxy-2'-fluoro modified nucleotide
  modified_base 8: mod_base = OTHER; note = 2'-deoxy-2'-fluoro modified nucleotide
  modified_base 11: mod_base = OTHER; note = 2'-deoxy-2'-fluoro modified nucleotide
  modified_base 18..19: mod_base = OTHER; note = 2'-deoxy-2'-fluoro modified nucleotide
  misc_feature 21: note = Nucleotide linked to an inverted abasic cap
  source 1..21: mol_type = other DNA
  misc_feature 1: note = DNA
  misc_feature 2..3: note = RNA
  misc_feature 4: note = DNA
  misc_feature 5..6: note = RNA
  misc_feature 7: note = DNA
  misc_feature 8: note = RNA
  misc_feature 9..10: note = DNA
  misc_feature 11: note = RNA
  misc_feature 12..17: note = DNA
  misc_feature 18..19: note = RNA
  misc_feature 20..21: note = DNA
gccactgtaacgggaagcttt

SEQ ID NO: 495 - RNA, 21 nt, synthetic construct
  misc_feature 1..21: note = Synthetic
  modified_base 4..8: mod_base = OTHER; note = 2'-deoxy-2'-fluoro modified nucleotide
  modified_base 9: mod_base = OTHER; note = 2'-O-methyl modified nucleotide
  modified_base 10..11: mod_base = OTHER; note = 2'-deoxy-2'-fluoro modified nucleotide
  modified_base 12: mod_base = OTHER; note = 2'-O-methyl modified nucleotide
  modified_base 13: mod_base = OTHER; note = 2'-deoxy-2'-fluoro modified nucleotide
  modified_base 15: mod_base = OTHER; note = 2'-O-methyl modified nucleotide
  modified_base 16: mod_base = OTHER; note = 2'-deoxy-2'-fluoro modified nucleotide
  modified_base 17..18: mod_base = OTHER; note = 2'-O-methyl modified nucleotide
  modified_base 19: mod_base = OTHER; note = 2'-deoxy-2'-fluoro modified nucleotide
  modified_base 20..21: mod_base = OTHER; note = 2'-O-methyl modified nucleotide
  source 1..21: mol_type = other RNA
agcttcccgttacagtggctt

SEQ ID NO: 496 - DNA, 21 bp, synthetic construct
  misc_feature 1..21: note = Synthetic
  misc_feature 1..19: note = ribonucleotide unmodified or modified as described for this sequence
  misc_feature 1: note = Nucleotide linked to an inverted abasic cap
  modified_base 2: mod_base = OTHER; note = 2'-deoxy-2'-fluoro modified nucleotide
  modified_base 4..7: mod_base = OTHER; note = 2'-deoxy-2'-fluoro modified nucleotide
  modified_base 10..11: mod_base = OTHER; note = 2'-deoxy-2'-fluoro modified nucleotide
  modified_base 13: mod_base = OTHER; note = 2'-deoxy-2'-fluoro modified nucleotide
  modified_base 16..17: mod_base = OTHER; note = 2'-deoxy-2'-fluoro modified nucleotide
  misc_feature 21: note = Nucleotide linked to an inverted abasic cap
  source 1..21: mol_type = other DNA
  misc_feature 1: note = DNA
  misc_feature 2: note = RNA
  misc_feature 3: note = DNA
  misc_feature 4..7: note = RNA
  misc_feature 8..9: note = DNA
  misc_feature 10..11: note = RNA
  misc_feature 12: note = DNA
  misc_feature 13: note = RNA
  misc_feature 14..15: note = DNA
  misc_feature 16..17: note = RNA
  misc_feature 18..21: note = DNA
gcactttaattacaactgatt

SEQ ID NO: 497 - RNA, 21 nt, synthetic construct
  misc_feature 1..21: note = Synthetic
  modified_base 4: mod_base = OTHER; note = 2'-O-methyl modified nucleotide
  modified_base 5..6: mod_base = OTHER; note = 2'-deoxy-2'-fluoro modified nucleotide
  modified_base 7: mod_base = OTHER; note = 2'-O-methyl modified nucleotide
  modified_base 8: mod_base = OTHER; note = 2'-deoxy-2'-fluoro modified nucleotide
  modified_base 9..10: mod_base = OTHER; note = 2'-O-methyl modified nucleotide
  modified_base 11..12: mod_base = OTHER; note = 2'-deoxy-2'-fluoro modified nucleotide
  modified_base 13: mod_base = OTHER; note = 2'-O-methyl modified nucleotide
  modified_base 15..16: mod_base = OTHER; note = 2'-O-methyl modified nucleotide
  modified_base 17: mod_base = OTHER; note = 2'-deoxy-2'-fluoro modified nucleotide
  modified_base 18: mod_base = OTHER; note = 2'-O-methyl modified nucleotide
  modified_base 19: mod_base = OTHER; note = 2'-deoxy-2'-fluoro modified nucleotide
  modified_base 20..21: mod_base = OTHER; note = 2'-O-methyl modified nucleotide
  source 1..21: mol_type = other RNA
tcagttgtaattaaagtgctt

SEQ ID NO: 498 - DNA, 21 bp, synthetic construct
  misc_feature 1..21: note = Synthetic
  misc_feature 1..19: note = ribonucleotide unmodified or modified as described for this sequence
  misc_feature 1: note = Nucleotide linked to an inverted abasic cap
  modified_base 1: mod_base = OTHER; note = 2'-deoxy-2'-fluoro modified nucleotide
  modified_base 3..4: mod_base = OTHER; note = 2'-deoxy-2'-fluoro modified nucleotide
  modified_base 9..10: mod_base = OTHER; note = 2'-deoxy-2'-fluoro modified nucleotide
  modified_base 13: mod_base = OTHER; note = 2'-deoxy-2'-fluoro modified nucleotide
  modified_base 15..17: mod_base = OTHER; note = 2'-deoxy-2'-fluoro modified nucleotide
  misc_feature 21: note = Nucleotide linked to an inverted abasic cap
  source 1..21: mol_type = other DNA
  misc_feature 1: note = RNA
  misc_feature 2: note = DNA
  misc_feature 3..4: note = RNA
  misc_feature 5..8: note = DNA
  misc_feature 9..10: note = RNA
  misc_feature 11..12: note = DNA
  misc_feature 13: note = RNA
  misc_feature 14: note = DNA
  misc_feature 15..17: note = RNA
  misc_feature 18..21: note = DNA
cgctgaagctggcgctcgatt

SEQ ID NO: 499 - RNA, 21 nt, synthetic construct
  misc_feature 1..21: note = Synthetic
  modified_base 4..5: mod_base = OTHER; note = 2'-O-methyl modified nucleotide
  modified_base 6: mod_base = OTHER; note = 2'-deoxy-2'-fluoro modified nucleotide
  modified_base 7: mod_base = OTHER; note = 2'-O-methyl modified nucleotide
  modified_base 8..9: mod_base = OTHER; note = 2'-deoxy-2'-fluoro modified nucleotide
  modified_base 10..11: mod_base = OTHER; note = 2'-O-methyl modified nucleotide
  modified_base 12..15: mod_base = OTHER; note = 2'-deoxy-2'-fluoro modified nucleotide
  modified_base 16..17: mod_base = OTHER; note = 2'-O-methyl modified nucleotide
  modified_base 18: mod_base = OTHER; note = 2'-deoxy-2'-fluoro modified nucleotide
  modified_base 19..21: mod_base = OTHER; note = 2'-O-methyl modified nucleotide
  source 1..21: mol_type = other RNA
tcgagcgccagcttcagcgtt

SEQ ID NO: 500 - DNA, 21 bp, synthetic construct
  misc_feature 1..21: note = Synthetic
  misc_feature 1..19: note = ribonucleotide unmodified or modified as described for this sequence
  misc_feature 1: note = Nucleotide linked to an inverted abasic cap
  modified_base 5: mod_base = OTHER; note = 2'-deoxy-2'-fluoro modified nucleotide
  modified_base 7: mod_base = OTHER; note = 2'-deoxy-2'-fluoro modified nucleotide
  modified_base 9: mod_base = OTHER; note = 2'-deoxy-2'-fluoro modified nucleotide
  modified_base 12: mod_base = OTHER; note = 2'-deoxy-2'-fluoro modified nucleotide
  modified_base 15..16: mod_base = OTHER; note = 2'-deoxy-2'-fluoro modified nucleotide
  modified_base 18..19: mod_base = OTHER; note = 2'-deoxy-2'-fluoro modified nucleotide
  misc_feature 21: note = Nucleotide linked to an inverted abasic cap
  source 1..21: mol_type = other DNA
  misc_feature 1..4: note = DNA
  misc_feature 5: note = RNA
  misc_feature 6: note = DNA
  misc_feature 7: note = RNA
  misc_feature 8: note = DNA
  misc_feature 9: note = RNA
  misc_feature 10..11: note = DNA
  misc_feature 12: note = RNA
  misc_feature 13..14: note = DNA
  misc_feature 15..16: note = RNA
  misc_feature 17: note = DNA
  misc_feature 18..19: note = RNA
  misc_feature 20..21: note = DNA
aaggtacgcaataactgtttt

SEQ ID NO: 501 - RNA, 21 nt, synthetic construct
  misc_feature 1..21: note = Synthetic
  modified_base 4..5: mod_base = OTHER; note = 2'-O-methyl modified nucleotide
  modified_base 6..7: mod_base = OTHER; note = 2'-deoxy-2'-fluoro modified nucleotide
  modified_base 8: mod_base = OTHER; note = 2'-O-methyl modified nucleotide
  modified_base 9..10: mod_base = OTHER; note = 2'-deoxy-2'-fluoro modified nucleotide
  modified_base 11: mod_base = OTHER; note = 2'-O-methyl modified nucleotide
  modified_base 12: mod_base = OTHER; note = 2'-deoxy-2'-fluoro modified nucleotide
  modified_base 13: mod_base = OTHER; note = 2'-O-methyl modified nucleotide
  modified_base 14: mod_base = OTHER; note = 2'-deoxy-2'-fluoro modified nucleotide
  modified_base 15: mod_base = OTHER; note = 2'-O-methyl modified nucleotide
  modified_base 16..19: mod_base = OTHER; note = 2'-deoxy-2'-fluoro modified nucleotide
  modified_base 20..21: mod_base = OTHER; note = 2'-O-methyl modified nucleotide
  source 1..21: mol_type = other RNA
aacagttattgcgtacctttt

SEQ ID NO: 502 - DNA, 21 bp, synthetic construct
  misc_feature 1..21: note = Synthetic
  misc_feature 1..19: note = ribonucleotide unmodified or modified as described for this sequence
  misc_feature 1: note = Nucleotide linked to an inverted abasic cap
  modified_base 3..4: mod_base = OTHER; note = 2'-deoxy-2'-fluoro modified nucleotide
  modified_base 8..10: mod_base = OTHER; note = 2'-deoxy-2'-fluoro modified nucleotide
  modified_base 13: mod_base = OTHER; note = 2'-deoxy-2'-fluoro modified nucleotide
  modified_base 17..19: mod_base = OTHER; note = 2'-deoxy-2'-fluoro modified nucleotide
  misc_feature 21: note = Nucleotide linked to an inverted abasic cap
  source 1..21: mol_type = other DNA
  misc_feature 1..2: note = DNA
  misc_feature 3..4: note = RNA
  misc_feature 5..7: note = DNA
  misc_feature 8..10: note = RNA
  misc_feature 11..12: note = DNA
  misc_feature 13: note = RNA
  misc_feature 14..16: note = DNA
  misc_feature 17..19: note = RNA
  misc_feature 20..21: note = DNA
ggttgaactcaataaaccttt

SEQ ID NO: 503 - RNA, 21 nt, synthetic construct
  misc_feature 1..21: note = Synthetic
  modified_base 4..6: mod_base = OTHER; note = 2'-deoxy-2'-fluoro modified nucleotide
  modified_base 7: mod_base = OTHER; note = 2'-O-methyl modified nucleotide
  modified_base 8..9: mod_base = OTHER; note = 2'-deoxy-2'-fluoro modified nucleotide
  modified_base 10..12: mod_base = OTHER; note = 2'-O-methyl modified nucleotide
  modified_base 13..15: mod_base = OTHER; note = 2'-deoxy-2'-fluoro modified nucleotide
  modified_base 16..17: mod_base = OTHER; note = 2'-O-methyl modified nucleotide
  modified_base 18..19: mod_base = OTHER; note = 2'-deoxy-2'-fluoro modified nucleotide
  modified_base 20..21: mod_base = OTHER; note = 2'-O-methyl modified nucleotide
  source 1..21: mol_type = other RNA
aggtttattgagttcaacctt

SEQ ID NO: 504 - RNA, 21 nt, synthetic construct
  misc_feature 1..21: note = Synthetic
  modified_base 4..5: mod_base = OTHER; note = 2'-O-methyl modified nucleotide
  modified_base 6: mod_base = OTHER; note = 2'-deoxy-2'-fluoro modified nucleotide
  modified_base 7..9: mod_base = OTHER; note = 2'-O-methyl modified nucleotide
  modified_base 10..12: mod_base = OTHER; note = 2'-deoxy-2'-fluoro modified nucleotide
  modified_base 13..14: mod_base = OTHER; note = 2'-O-methyl modified nucleotide
  modified_base 15: mod_base = OTHER; note = 2'-deoxy-2'-fluoro modified nucleotide
  modified_base 16..17: mod_base = OTHER; note = 2'-O-methyl modified nucleotide
  modified_base 18..19: mod_base = OTHER; note = 2'-deoxy-2'-fluoro modified nucleotide
  modified_base 20..21: mod_base = OTHER; note = 2'-O-methyl modified nucleotide
  modified_base 20..21: mod_base = OTHER; note = phosphorothioate linkage
  source 1..21: mol_type = other RNA
tctccatttggattatcaatt

SEQ ID NO: 505 - DNA, 21 bp, synthetic construct
  misc_feature 1..21: note = Synthetic
  misc_feature 1..19: note = ribonucleotide unmodified or modified as described for this sequence
  misc_feature 1: note = Nucleotide linked to an inverted abasic cap
  modified_base 2..3: mod_base = OTHER; note = 2'-deoxy-2'-fluoro modified nucleotide
  modified_base 5: mod_base = OTHER; note = 2'-deoxy-2'-fluoro modified nucleotide
  modified_base 7..8: mod_base = OTHER; note = 2'-deoxy-2'-fluoro modified nucleotide
  modified_base 10: mod_base = OTHER; note = 2'-deoxy-2'-fluoro modified nucleotide
  modified_base 12: mod_base = OTHER; note = 2'-deoxy-2'-fluoro modified nucleotide
  modified_base 14: mod_base = OTHER; note = 2'-deoxy-2'-fluoro modified nucleotide
  modified_base 18: mod_base = OTHER; note = 2'-deoxy-2'-fluoro modified nucleotide
  misc_feature 21: note = Nucleotide linked to an inverted abasic cap
  source 1..21: mol_type = other DNA
  misc_feature 1: note = DNA
  misc_feature 2..3: note = RNA
  misc_feature 4: note = DNA
  misc_feature 5: note = RNA
  misc_feature 6: note = DNA
  misc_feature 7..8: note = RNA
  misc_feature 9: note = DNA
  misc_feature 10: note = RNA
  misc_feature 11: note = DNA
  misc_feature 12: note = RNA
  misc_feature 13: note = DNA
  misc_feature 14: note = RNA
  misc_feature 15..17: note = DNA
  misc_feature 18: note = RNA
  misc_feature 19..21: note = DNA
atcgtgccgtgcatgaacatt

SEQ ID NO: 506 - RNA, 21 nt, synthetic construct
  misc_feature 1..21: note = Synthetic
  modified_base 4..5: mod_base = OTHER; note = 2'-deoxy-2'-fluoro modified nucleotide
  modified_base 6: mod_base = OTHER; note = 2'-O-methyl modified nucleotide
  modified_base 7: mod_base = OTHER; note = 2'-deoxy-2'-fluoro modified nucleotide
  modified_base 8: mod_base = OTHER; note = 2'-O-methyl modified nucleotide
  modified_base 9: mod_base = OTHER; note = 2'-deoxy-2'-fluoro modified nucleotide
  modified_base 10: mod_base = OTHER; note = 2'-O-methyl modified nucleotide
  modified_base 11: mod_base = OTHER; note = 2'-deoxy-2'-fluoro modified nucleotide
  modified_base 12..13: mod_base = OTHER; note = 2'-O-methyl modified nucleotide
  modified_base 14: mod_base = OTHER; note = 2'-deoxy-2'-fluoro modified nucleotide
  modified_base 15: mod_base = OTHER; note = 2'-O-methyl modified nucleotide
  modified_base 16: mod_base = OTHER; note = 2'-deoxy-2'-fluoro modified nucleotide
  modified_base 17..18: mod_base = OTHER; note = 2'-O-methyl modified nucleotide
  modified_base 19: mod_base = OTHER; note = 2'-deoxy-2'-fluoro modified nucleotide
  modified_base 20..21: mod_base = OTHER; note = 2'-O-methyl modified nucleotide
  source 1..21: mol_type = other RNA
tgttcatgcacggcacgattt

SEQ ID NO: 507 - DNA, 21 bp, synthetic construct
  misc_feature 1..21: note = Synthetic
  misc_feature 1..19: note = ribonucleotide unmodified or modified as described for this sequence
  misc_feature 1: note = Nucleotide linked to an inverted abasic cap
  modified_base 1: mod_base = OTHER; note = 2'-deoxy-2'-fluoro modified nucleotide
  modified_base 5: mod_base = OTHER; note = 2'-deoxy-2'-fluoro modified nucleotide
  modified_base 8..9: mod_base = OTHER; note = 2'-deoxy-2'-fluoro modified nucleotide
  modified_base 12..14: mod_base = OTHER; note = 2'-deoxy-2'-fluoro modified nucleotide
  modified_base 16: mod_base = OTHER; note = 2'-deoxy-2'-fluoro modified nucleotide
  modified_base 18..19: mod_base = OTHER; note = 2'-deoxy-2'-fluoro modified nucleotide
  misc_feature 21: note = Nucleotide linked to an inverted abasic cap
  source 1..21: mol_type = other DNA
  misc_feature 1: note = RNA
  misc_feature 2..4: note = DNA
  misc_feature 5: note = RNA
  misc_feature 6..7: note = DNA
  misc_feature 8..9: note = RNA
  misc_feature 10..11: note = DNA
  misc_feature 12..14: note = RNA
  misc_feature 15: note = DNA
  misc_feature 16: note = RNA
  misc_feature 17: note = DNA
  misc_feature 18..19: note = RNA
  misc_feature 20..21: note = DNA
tagacaaccagttcgcatttt

SEQ ID NO: 508 - RNA, 21 nt, synthetic construct
  misc_feature 1..21: note = Synthetic
  modified_base 4: mod_base = OTHER; note = 2'-O-methyl modified nucleotide
  modified_base 5: mod_base = OTHER; note = 2'-deoxy-2'-fluoro modified nucleotide
  modified_base 6..8: mod_base = OTHER; note = 2'-O-methyl modified nucleotide
  modified_base 9..10: mod_base = OTHER; note = 2'-deoxy-2'-fluoro modified nucleotide
  modified_base 11..12: mod_base = OTHER; note = 2'-O-methyl modified nucleotide
  modified_base 13..14: mod_base = OTHER; note = 2'-deoxy-2'-fluoro modified nucleotide
  modified_base 15: mod_base = OTHER; note = 2'-O-methyl modified nucleotide
  modified_base 16..18: mod_base = OTHER; note = 2'-deoxy-2'-fluoro modified nucleotide
  modified_base 19..21: mod_base = OTHER; note = 2'-O-methyl modified nucleotide
  source 1..21: mol_type = other RNA
aatgcgaactggttgtctatt

SEQ ID NO: 509 - DNA, 21 bp, synthetic construct
  misc_feature 1..21: note = Synthetic
  misc_feature 1..19: note = ribonucleotide unmodified or modified as described for this sequence
  misc_feature 1: note = Nucleotide linked to an inverted abasic cap
  modified_base 6: mod_base = OTHER; note = 2'-deoxy-2'-fluoro modified nucleotide
  modified_base 8: mod_base = OTHER; note = 2'-deoxy-2'-fluoro modified nucleotide
  modified_base 10..13: mod_base = OTHER; note = 2'-deoxy-2'-fluoro modified nucleotide
  modified_base 17..19: mod_base = OTHER; note = 2'-deoxy-2'-fluoro modified nucleotide
  misc_feature 21: note = Nucleotide linked to an inverted abasic cap
  source 1..21: mol_type = other DNA
  misc_feature 1..5: note = DNA
  misc_feature 6: note = RNA
  misc_feature 7: note = DNA
  misc_feature 8: note = RNA
  misc_feature 9: note = DNA
  misc_feature 10..13: note = RNA
  misc_feature 14..16: note = DNA
  misc_feature 17..19: note = RNA
  misc_feature 20..21: note = DNA
ggaggtatacttcgaattttt

SEQ ID NO: 510 - RNA, 21 nt, synthetic construct
  misc_feature 1..21: note = Synthetic
  modified_base 4..6: mod_base = OTHER; note = 2'-deoxy-2'-fluoro modified nucleotide
  modified_base 7..10: mod_base = OTHER; note = 2'-O-methyl modified nucleotide
  modified_base 11: mod_base = OTHER; note = 2'-deoxy-2'-fluoro modified nucleotide
  modified_base 12: mod_base = OTHER; note = 2'-O-methyl modified nucleotide
  modified_base 13: mod_base = OTHER; note = 2'-deoxy-2'-fluoro modified nucleotide
  modified_base 15..19: mod_base = OTHER; note = 2'-deoxy-2'-fluoro modified nucleotide
  modified_base 20..21: mod_base = OTHER; note = 2'-O-methyl modified nucleotide
  source 1..21: mol_type = other RNA
aaattcgaagtatacctcctt

SEQ ID NO: 511 - DNA, 21 bp, synthetic construct
  misc_feature 1..21: note = Synthetic
  misc_feature 1..19: note = ribonucleotide unmodified or modified as described for this sequence
  misc_feature 1: note = Nucleotide linked to an inverted abasic cap
  modified_base 2: mod_base = OTHER; note = 2'-deoxy-2'-fluoro modified nucleotide
  modified_base 4..5: mod_base = OTHER; note = 2'-deoxy-2'-fluoro modified nucleotide
  modified_base 7: mod_base = OTHER; note = 2'-deoxy-2'-fluoro modified nucleotide
  modified_base 9: mod_base = OTHER; note = 2'-deoxy-2'-fluoro modified nucleotide
  modified_base 11: mod_base = OTHER; note = 2'-deoxy-2'-fluoro modified nucleotide
  modified_base 15: mod_base = OTHER; note = 2'-deoxy-2'-fluoro modified nucleotide
  modified_base 19: mod_base = OTHER; note = 2'-deoxy-2'-fluoro modified nucleotide
  misc_feature 21: note = Nucleotide linked to an inverted abasic cap
  source 1..21: mol_type = other DNA
  misc_feature 1: note = DNA
  misc_feature 2: note = RNA
  misc_feature 3: note = DNA
  misc_feature 4..5: note = RNA
  misc_feature 6: note = DNA
  misc_feature 7: note = RNA
  misc_feature 8: note = DNA
  misc_feature 9: note = RNA
  misc_feature 10: note = DNA
  misc_feature 11: note = RNA
  misc_feature 12..14: note = DNA
  misc_feature 15: note = RNA
  misc_feature 16..18: note = DNA
  misc_feature 19: note = RNA
  misc_feature 20..21: note = DNA
gtgccgtgcatgaacaagctt

SEQ ID NO: 512 - RNA, 21 nt, synthetic construct
  misc_feature 1..21: note = Synthetic
  modified_base 4: mod_base = OTHER; note = 2'-deoxy-2'-fluoro modified nucleotide
  modified_base 5: mod_base = OTHER; note = 2'-O-methyl modified nucleotide
  modified_base 6..8: mod_base = OTHER; note = 2'-deoxy-2'-fluoro modified nucleotide
  modified_base 9: mod_base = OTHER; note = 2'-O-methyl modified nucleotide
  modified_base 10: mod_base = OTHER; note = 2'-deoxy-2'-fluoro modified nucleotide
  modified_base 11: mod_base = OTHER; note = 2'-O-methyl modified nucleotide
  modified_base 12: mod_base = OTHER; note = 2'-deoxy-2'-fluoro modified nucleotide
  modified_base 13: mod_base = OTHER; note = 2'-O-methyl modified nucleotide
  modified_base 14: mod_base = OTHER; note = 2'-deoxy-2'-fluoro modified nucleotide
  modified_base 15..16: mod_base = OTHER; note = 2'-O-methyl modified nucleotide
  modified_base 17: mod_base = OTHER; note = 2'-deoxy-2'-fluoro modified nucleotide
  modified_base 18: mod_base = OTHER; note = 2'-O-methyl modified nucleotide
  modified_base 19: mod_base = OTHER; note = 2'-deoxy-2'-fluoro modified nucleotide
  modified_base 20..21: mod_base = OTHER; note = 2'-O-methyl modified nucleotide
  source 1..21: mol_type = other RNA
gcttgttcatgcacggcactt

SEQ ID NO: 513 - DNA, 21 bp, synthetic construct
  misc_feature 1..21: note = Synthetic
  misc_feature 1..19: note = ribonucleotide unmodified or modified as described for this sequence
  misc_feature 1: note = Nucleotide linked to an inverted abasic cap
  modified_base 1: mod_base = OTHER; note = 2'-deoxy-2'-fluoro modified nucleotide
  modified_base 8..10: mod_base = OTHER; note = 2'-deoxy-2'-fluoro modified nucleotide
  modified_base 13..14: mod_base = OTHER; note = 2'-deoxy-2'-fluoro modified nucleotide
  modified_base 16: mod_base = OTHER; note = 2'-deoxy-2'-fluoro modified nucleotide
  misc_feature 21: note = Nucleotide linked to an inverted abasic cap
  source 1..21: mol_type = other DNA
  misc_feature 1: note = RNA
  misc_feature 2..7: note = DNA
  misc_feature 8..10: note = RNA
  misc_feature 11..12: note = DNA
  misc_feature 13..14: note = RNA
  misc_feature 15: note = DNA
  misc_feature 16: note = RNA
  misc_feature 17..21: note = DNA
caaggagcccggctgcgaatt

SEQ ID NO: 514 - RNA, 21 nt, synthetic construct
  misc_feature 1..21: note = Synthetic
  modified_base 4: mod_base = OTHER; note = 2'-O-methyl modified nucleotide
  modified_base 5: mod_base = OTHER; note = 2'-deoxy-2'-fluoro modified nucleotide
  modified_base 6..7: mod_base = OTHER; note = 2'-O-methyl modified nucleotide
  modified_base 8..9: mod_base = OTHER; note = 2'-deoxy-2'-fluoro modified nucleotide
  modified_base 10..12: mod_base = OTHER; note = 2'-O-methyl modified nucleotide
  modified_base 13..18: mod_base = OTHER; note = 2'-deoxy-2'-fluoro modified nucleotide
  modified_base 19..21: mod_base = OTHER; note = 2'-O-methyl modified nucleotide
  source 1..21: mol_type = other RNA
ttcgcagccgggctccttgtt

SEQ ID NO: 515 - RNA, 21 nt, synthetic construct
  misc_feature 1..21: note = Synthetic
  modified_base 4: mod_base = OTHER; note = 2'-deoxy-2'-fluoro modified nucleotide
  modified_base 5..7: mod_base = OTHER; note = 2'-O-methyl modified nucleotide
  modified_base 8..10: mod_base = OTHER; note = 2'-deoxy-2'-fluoro modified nucleotide
  modified_base 11..12: mod_base = OTHER; note = 2'-O-methyl modified nucleotide
  modified_base 13: mod_base = OTHER; note = 2'-deoxy-2'-fluoro modified nucleotide
  modified_base 14..15: mod_base = OTHER; note = 2'-O-methyl modified nucleotide
  modified_base 16..17: mod_base = OTHER; note = 2'-deoxy-2'-fluoro modified nucleotide
  modified_base 18: mod_base = OTHER; note = 2'-O-methyl modified nucleotide
  modified_base 19: mod_base = OTHER; note = 2'-deoxy-2'-fluoro modified nucleotide
  modified_base 20..21: mod_base = OTHER; note = 2'-O-methyl modified nucleotide
  modified_base 20..21: mod_base = OTHER; note = phosphorothioate linkage
  source 1..21: mol_type = other RNA
tccatttggattatcaacatt

SEQ ID NO: 516 - DNA, 21 bp, synthetic construct
  misc_feature 1..21: note = Synthetic
  misc_feature 1..19: note = ribonucleotide unmodified or modified as described for this sequence
  misc_feature 1: note = Nucleotide linked to an inverted abasic cap
  modified_base 2: mod_base = OTHER; note = 2'-deoxy-2'-fluoro modified nucleotide
  modified_base 9..11: mod_base = OTHER; note = 2'-deoxy-2'-fluoro modified nucleotide
  modified_base 14..15: mod_base = OTHER; note = 2'-deoxy-2'-fluoro modified nucleotide
  modified_base 17: mod_base = OTHER; note = 2'-deoxy-2'-fluoro modified nucleotide
  misc_feature 21: note = Nucleotide linked to an inverted abasic cap
  source 1..21: mol_type = other DNA
  misc_feature 1: note = DNA
  misc_feature 2: note = RNA
  misc_feature 3..8: note = DNA
  misc_feature 9..11: note = RNA
  misc_feature 12..13: note = DNA
  misc_feature 14..15: note = RNA
  misc_feature 16: note = DNA
  misc_feature 17: note = RNA
  misc_feature 18..21: note = DNA
gcaaggagcccggctgcgatt

SEQ ID NO: 517 - RNA, 21 nt, synthetic construct
  misc_feature 1..21: note = Synthetic
  modified_base 4: mod_base = OTHER; note = 2'-deoxy-2'-fluoro modified nucleotide
  modified_base 5..6: mod_base = OTHER; note = 2'-O-methyl modified nucleotide
  modified_base 7..8: mod_base = OTHER; note = 2'-deoxy-2'-fluoro modified nucleotide
  modified_base 9..11: mod_base = OTHER; note = 2'-O-methyl modified nucleotide
  modified_base 12..17: mod_base = OTHER; note = 2'-deoxy-2'-fluoro modified nucleotide
  modified_base 18: mod_base = OTHER; note = 2'-O-methyl modified nucleotide
  modified_base 19: mod_base = OTHER; note = 2'-deoxy-2'-fluoro modified nucleotide
  modified_base 20..21: mod_base = OTHER; note = 2'-O-methyl modified nucleotide
  source 1..21: mol_type = other RNA
tcgcagccgggctccttgctt

SEQ ID NO: 518 - RNA, 21 nt, synthetic construct
  misc_feature 1..21: note = Synthetic
  modified_base 4: mod_base = OTHER; note = 2'-O-methyl modified nucleotide
  modified_base 5: mod_base = OTHER; note = 2'-deoxy-2'-fluoro modified nucleotide
  modified_base 6: mod_base = OTHER; note = 2'-O-methyl modified nucleotide
  modified_base 7: mod_base = OTHER; note = 2'-deoxy-2'-fluoro modified nucleotide
  modified_base 8: mod_base = OTHER; note = 2'-O-methyl modified nucleotide
  modified_base 9: mod_base = OTHER; note = 2'-deoxy-2'-fluoro modified nucleotide
  modified_base 10: mod_base = OTHER; note = 2'-O-methyl modified nucleotide
  modified_base 11: mod_base = OTHER; note = 2'-deoxy-2'-fluoro modified nucleotide
  modified_base 12: mod_base = OTHER; note = 2'-O-methyl modified nucleotide
  modified_base 13: mod_base = OTHER; note = 2'-deoxy-2'-fluoro modified nucleotide
  modified_base 14..15: mod_base = OTHER; note = 2'-O-methyl modified nucleotide
  modified_base 16: mod_base = OTHER; note = 2'-deoxy-2'-fluoro modified nucleotide
  modified_base 17: mod_base = OTHER; note = 2'-O-methyl modified nucleotide
  modified_base 18: mod_base = OTHER; note = 2'-deoxy-2'-fluoro modified nucleotide
  modified_base 19..21: mod_base = OTHER; note = 2'-O-methyl modified nucleotide
  modified_base 20..21: mod_base = OTHER; note = phosphorothioate linkage
  source 1..21: mol_type = other RNA
taatatatacatgtcacactt

SEQ ID NO: 519 - DNA, 21 bp, synthetic construct
  misc_feature 1..21: note = Synthetic
  misc_feature 1..19: note = ribonucleotide unmodified or modified as described for this sequence
  misc_feature 1: note = Nucleotide linked to an inverted abasic cap
  modified_base 1..2: mod_base = OTHER; note = 2'-deoxy-2'-fluoro modified nucleotide
  modified_base 6: mod_base = OTHER; note = 2'-deoxy-2'-fluoro modified nucleotide
  modified_base 9: mod_base = OTHER; note = 2'-deoxy-2'-fluoro modified nucleotide
  modified_base 14: mod_base = OTHER; note = 2'-deoxy-2'-fluoro modified nucleotide
  modified_base 18..19: mod_base = OTHER; note = 2'-deoxy-2'-fluoro modified nucleotide
  misc_feature 21: note = Nucleotide linked to an inverted abasic cap
  source 1..21: mol_type = other DNA
  misc_feature 1..2: note = RNA
  misc_feature 3..5: note = DNA
  misc_feature 6: note = RNA
  misc_feature 7..8: note = DNA
  misc_feature 9: note = RNA
  misc_feature 10..13: note = DNA
  misc_feature 14: note = RNA
  misc_feature 15..17: note = DNA
  misc_feature 18..19: note = RNA
  misc_feature 20..21: note = DNA
ccgggcaatggaacgggtttt

SEQ ID NO: 520 - RNA, 21 nt, synthetic construct
  misc_feature 1..21: note = Synthetic
  modified_base 4..5: mod_base = OTHER; note = 2'-deoxy-2'-fluoro modified nucleotide
  modified_base 6: mod_base = OTHER; note = 2'-O-methyl modified nucleotide
  modified_base 7..10: mod_base = OTHER; note = 2'-deoxy-2'-fluoro modified nucleotide
  modified_base 11: mod_base = OTHER; note = 2'-O-methyl modified nucleotide
  modified_base 12..13: mod_base = OTHER; note = 2'-deoxy-2'-fluoro modified nucleotide
  modified_base 15..17: mod_base = OTHER; note = 2'-deoxy-2'-fluoro modified nucleotide
  modified_base 18..21: mod_base = OTHER; note = 2'-O-methyl modified nucleotide
  source 1..21: mol_type = other RNA
aacccgttccattgcccggtt

SEQ ID NO: 521 - DNA, 21 bp, synthetic construct
  misc_feature 1..21: note = Synthetic
  misc_feature 1..19: note = ribonucleotide unmodified or modified as described for this sequence
  misc_feature 1: note = Nucleotide linked to an inverted abasic cap
  modified_base 2..3: mod_base = OTHER; note = 2'-deoxy-2'-fluoro modified nucleotide
  modified_base 6: mod_base = OTHER; note = 2'-deoxy-2'-fluoro modified nucleotide
  modified_base 8: mod_base = OTHER; note = 2'-deoxy-2'-fluoro modified nucleotide
  modified_base 10: mod_base = OTHER; note = 2'-deoxy-2'-fluoro modified nucleotide
  modified_base 12..13: mod_base = OTHER; note = 2'-deoxy-2'-fluoro modified nucleotide
  modified_base 15: mod_base = OTHER; note = 2'-deoxy-2'-fluoro modified nucleotide
  misc_feature 21: note = Nucleotide linked to an inverted abasic cap
  source 1..21: mol_type = other DNA
  misc_feature 1: note = DNA
  misc_feature 2..3: note = RNA
  misc_feature 4..5: note = DNA
  misc_feature 6: note = RNA
  misc_feature 7: note = DNA
  misc_feature 8: note = RNA
  misc_feature 9: note = DNA
  misc_feature 10: note = RNA
  misc_feature 11: note = DNA
  misc_feature 12..13: note = RNA
  misc_feature 14: note = DNA
  misc_feature 15: note = RNA
  misc_feature 16..21: note = DNA
accagcatatgctacaaggtt

SEQ ID NO: 522 - RNA, 21 nt, synthetic construct
  misc_feature 1..21: note = Synthetic
  modified_base 4: mod_base = OTHER; note = 2'-deoxy-2'-fluoro modified nucleotide
  modified_base 5: mod_base = OTHER; note = 2'-O-methyl modified nucleotide
  modified_base 6: mod_base = OTHER; note = 2'-deoxy-2'-fluoro modified nucleotide
  modified_base 7..8: mod_base = OTHER; note = 2'-O-methyl modified nucleotide
  modified_base 9: mod_base = OTHER; note = 2'-deoxy-2'-fluoro modified nucleotide
  modified_base 10: mod_base = OTHER; note = 2'-O-methyl modified nucleotide
  modified_base 11: mod_base = OTHER; note = 2'-deoxy-2'-fluoro modified nucleotide
  modified_base 12: mod_base = OTHER; note = 2'-O-methyl modified nucleotide
  modified_base 13: mod_base = OTHER; note = 2'-deoxy-2'-fluoro modified nucleotide
  modified_base 15..16: mod_base = OTHER; note = 2'-deoxy-2'-fluoro modified nucleotide
  modified_base 17..18: mod_base = OTHER; note = 2'-O-methyl modified nucleotide
  modified_base 19: mod_base = OTHER; note = 2'-deoxy-2'-fluoro modified nucleotide
  modified_base 20..21: mod_base = OTHER; note = 2'-O-methyl modified nucleotide
  source 1..21: mol_type = other RNA
ccttgtagcatatgctggttt

SEQ ID NO: 523 - DNA, 21 bp, synthetic construct
  misc_feature 1..21: note = Synthetic
  misc_feature 1..19: note = ribonucleotide unmodified or modified as described for this sequence
  misc_feature 1: note = Nucleotide linked to an inverted abasic cap
  modified_base 1..6: mod_base = OTHER; note = 2'-deoxy-2'-fluoro modified nucleotide
  modified_base 9: mod_base = OTHER; note = 2'-deoxy-2'-fluoro modified nucleotide
  modified_base 12: mod_base = OTHER; note = 2'-deoxy-2'-fluoro modified nucleotide
  modified_base 15..16: mod_base = OTHER; note = 2'-deoxy-2'-fluoro modified nucleotide
  modified_base 18..19: mod_base = OTHER; note = 2'-deoxy-2'-fluoro modified nucleotide
  misc_feature 21: note = Nucleotide linked to an inverted abasic cap
  source 1..21: mol_type = other DNA
  misc_feature 1..6: note = RNA
  misc_feature 7..8: note = DNA
  misc_feature 9: note = RNA
  misc_feature 10..11: note = DNA
  misc_feature 12: note = RNA
  misc_feature 13..14: note = DNA
  misc_feature 15..16: note = RNA
  misc_feature 17: note = DNA
  misc_feature 18..19: note = RNA
  misc_feature 20..21: note = DNA
cctcttaataatgattgtttt

SEQ ID NO: 524 - RNA, 21 nt, synthetic construct
  misc_feature 1..21: note = Synthetic
  modified_base 4..5: mod_base = OTHER; note = 2'-O-methyl modified nucleotide
  modified_base 6..7: mod_base = OTHER; note = 2'-deoxy-2'-fluoro modified nucleotide
  modified_base 8: mod_base = OTHER; note = 2'-O-methyl modified nucleotide
  modified_base 9..10: mod_base = OTHER; note = 2'-deoxy-2'-fluoro modified nucleotide
  modified_base 11: mod_base = OTHER; note = 2'-O-methyl modified nucleotide
  modified_base 12..13: mod_base = OTHER; note = 2'-deoxy-2'-fluoro modified nucleotide
  modified_base 15..21: mod_base = OTHER; note = 2'-O-methyl modified nucleotide
  source 1..21: mol_type = other RNA
aacaatcattattaagaggtt

SEQ ID NO: 525 - DNA, 21 bp, synthetic construct
  misc_feature 1..21: note = Synthetic
  misc_feature 1..19: note = ribonucleotide unmodified or modified as described for this sequence
  misc_feature 1: note = Nucleotide linked to an inverted abasic cap
  modified_base 3..6: mod_base = OTHER; note = 2'-deoxy-2'-fluoro modified nucleotide
  modified_base 8: mod_base = OTHER; note = 2'-deoxy-2'-fluoro modified nucleotide
  modified_base 10..11: mod_base = OTHER; note = 2'-deoxy-2'-fluoro modified nucleotide
  modified_base 13: mod_base = OTHER; note = 2'-deoxy-2'-fluoro modified nucleotide
  modified_base 15: mod_base = OTHER; note = 2'-deoxy-2'-fluoro modified nucleotide
  modified_base 18..19: mod_base = OTHER; note = 2'-deoxy-2'-fluoro modified nucleotide
  misc_feature 21: note = Nucleotide linked to an inverted abasic cap
  source 1..21: mol_type = other DNA
  misc_feature 1..2: note = DNA
  misc_feature 3..6: note = RNA
  misc_feature 7: note = DNA
  misc_feature 8: note = RNA
  misc_feature 9: note = DNA
  misc_feature 10..11: note = RNA
  misc_feature 12: note = DNA
  misc_feature 13: note = RNA
  misc_feature 14: note = DNA
  misc_feature 15: note = RNA
  misc_feature 16..17: note = DNA
  misc_feature 18..19: note = RNA
  misc_feature 20..21: note = DNA
gactttgtactgcatgatctt

SEQ ID NO: 526 - RNA, 21 nt, synthetic construct
  misc_feature 1..21: note = Synthetic
  modified_base 4: mod_base = OTHER; note = 2'-deoxy-2'-fluoro modified nucleotide
  modified_base 5: mod_base = OTHER; note = 2'-O-methyl modified nucleotide
  modified_base 6: mod_base = OTHER; note = 2'-deoxy-2'-fluoro modified nucleotide
  modified_base 7: mod_base = OTHER; note = 2'-O-methyl modified nucleotide
  modified_base 8: mod_base = OTHER; note = 2'-deoxy-2'-fluoro modified nucleotide
  modified_base 9..10: mod_base = OTHER; note = 2'-O-methyl modified nucleotide
  modified_base 11: mod_base = OTHER; note = 2'-deoxy-2'-fluoro modified nucleotide
  modified_base 12: mod_base = OTHER; note = 2'-O-methyl modified nucleotide
  modified_base 13: mod_base = OTHER; note = 2'-deoxy-2'-fluoro modified nucleotide
  modified_base 15..17: mod_base = OTHER; note = 2'-O-methyl modified nucleotide
  modified_base 18..19: mod_base = OTHER; note = 2'-deoxy-2'-fluoro modified nucleotide
  modified_base 20..21: mod_base = OTHER; note = 2'-O-methyl modified nucleotide
  source 1..21: mol_type = other RNA
gatcatgcagtacaaagtctt

SEQ ID NO: 527 - DNA, 21 bp, synthetic construct
  misc_feature 1..21: note = Synthetic
  misc_feature 1..19: note = ribonucleotide unmodified or modified as described for this sequence
  misc_feature 1: note = Nucleotide linked to an inverted abasic cap
  modified_base 1: mod_base = OTHER; note = 2'-deoxy-2'-fluoro modified nucleotide
  modified_base 6: mod_base = OTHER; note = 2'-deoxy-2'-fluoro modified nucleotide
  modified_base 8: mod_base = OTHER; note = 2'-deoxy-2'-fluoro modified nucleotide
  modified_base 10: mod_base = OTHER; note = 2'-deoxy-2'-fluoro modified nucleotide
  modified_base 13: mod_base = OTHER; note = 2'-deoxy-2'-fluoro modified nucleotide
  modified_base 16..17: mod_base = OTHER; note = 2'-deoxy-2'-fluoro modified nucleotide
  modified_base 19: mod_base = OTHER; note = 2'-deoxy-2'-fluoro modified nucleotide
  misc_feature 21: note = Nucleotide linked to an inverted abasic cap
  source 1..21: mol_type = other DNA
  misc_feature 1: note = RNA
  misc_feature 2..5: note = DNA
  misc_feature 6: note = RNA
  misc_feature 7: note = DNA
  misc_feature 8: note = RNA
  misc_feature 9: note = DNA
  misc_feature 10: note = RNA
  misc_feature 11..12: note = DNA
  misc_feature 13: note = RNA
  misc_feature 14..15: note = DNA
  misc_feature 16..17: note = RNA
  misc_feature 18: note = DNA
  misc_feature 19: note = RNA
  misc_feature 20..21: note = DNA
caaggtacgcaataactgttt

SEQ ID NO: 528 - RNA, 21 nt, synthetic construct
  misc_feature 1..21: note = Synthetic
  modified_base 4: mod_base = OTHER; note = 2'-O-methyl modified nucleotide
  modified_base 5..6: mod_base = OTHER; note = 2'-deoxy-2'-fluoro modified nucleotide
  modified_base 7: mod_base = OTHER; note = 2'-O-methyl modified nucleotide
  modified_base 8..9: mod_base = OTHER; note = 2'-deoxy-2'-fluoro modified nucleotide
  modified_base 10: mod_base = OTHER; note = 2'-O-methyl modified nucleotide
  modified_base 11: mod_base = OTHER; note = 2'-deoxy-2'-fluoro modified nucleotide
  modified_base 12: mod_base = OTHER; note = 2'-O-methyl modified nucleotide
  modified_base 13: mod_base = OTHER; note = 2'-deoxy-2'-fluoro modified nucleotide
  modified_base 15..18: mod_base = OTHER; note = 2'-deoxy-2'-fluoro modified nucleotide
  modified_base 19..21: mod_base = OTHER; note = 2'-O-methyl modified nucleotide
  source 1..21: mol_type = other RNA
acagttattgcgtaccttgtt

SEQ ID NO: 529 - DNA, 21 bp, synthetic construct
  misc_feature 1..21: note = Synthetic
  misc_feature 1..19: note = ribonucleotide unmodified or modified as described for this sequence
  misc_feature 1: note = Nucleotide linked to an inverted abasic cap
  modified_base 4..6: mod_base = OTHER; note = 2'-deoxy-2'-fluoro modified nucleotide
  modified_base 9..10: mod_base = OTHER; note = 2'-deoxy-2'-fluoro modified nucleotide
  modified_base 12: mod_base = OTHER; note = 2'-deoxy-2'-fluoro modified nucleotide
  modified_base 17..18: mod_base = OTHER; note = 2'-deoxy-2'-fluoro modified nucleotide
  misc_feature 21: note = Nucleotide linked to an inverted abasic cap
  source 1..21: mol_type = other DNA
  misc_feature 1..3: note = DNA
  misc_feature 4..6: note = RNA
  misc_feature 7..8: note = DNA
  misc_feature 9..10: note = RNA
  misc_feature 11: note = DNA
  misc_feature 12: note = RNA
  misc_feature 13..16: note = DNA
  misc_feature 17..18: note = RNA
  misc_feature 19..21: note = DNA
gagcccggctgcgaaaccatt

SEQ ID NO: 530 - RNA, 21 nt, synthetic construct
  misc_feature 1..21: note = Synthetic
  modified_base 4..7: mod_base = OTHER; note = 2'-deoxy-2'-fluoro modified nucleotide
  modified_base 8: mod_base = OTHER; note = 2'-O-methyl modified nucleotide
  modified_base 9: mod_base = OTHER; note = 2'-deoxy-2'-fluoro modified nucleotide
  modified_base 10..11: mod_base = OTHER; note = 2'-O-methyl modified nucleotide
  modified_base 12..13: mod_base = OTHER; note = 2'-deoxy-2'-fluoro modified nucleotide
  modified_base 15..16: mod_base = OTHER; note = 2'-O-methyl modified nucleotide
  modified_base 17..19: mod_base = OTHER; note = 2'-deoxy-2'-fluoro modified nucleotide
  modified_base 20..21: mod_base = OTHER; note = 2'-O-methyl modified nucleotide
  source 1..21: mol_type = other RNA
tggtttcgcagccgggctctt

SEQ ID NO: 531 - RNA, 21 nt, synthetic construct
  misc_feature 1..21: note = Synthetic
  modified_base 4..6: mod_base = OTHER; note = 2'-deoxy-2'-fluoro modified nucleotide
  modified_base 8..9: mod_base = OTHER; note = 2'-deoxy-2'-fluoro modified nucleotide
  modified_base 11: mod_base = OTHER; note = 2'-deoxy-2'-fluoro modified nucleotide
  modified_base 13: mod_base = OTHER; note = 2'-deoxy-2'-fluoro modified nucleotide
  modified_base 15: mod_base = OTHER; note = 2'-deoxy-2'-fluoro modified nucleotide
  modified_base 17: mod_base = OTHER; note = 2'-deoxy-2'-fluoro modified nucleotide
  modified_base 19: mod_base = OTHER; note = 2'-deoxy-2'-fluoro modified nucleotide
  modified_base 20..21: mod_base = OTHER; note = 2'-O-methyl modified nucleotide
  modified_base 20..21: mod_base = OTHER; note = phosphorothioate linkage
  source 1..21: mol_type = other RNA
ttaagataatatatacatgtt

SEQ ID NO: 532 - DNA, 21 bp, synthetic construct
  misc_feature 1..21: note = Synthetic
  misc_feature 1..19: note = ribonucleotide unmodified or modified as described for this sequence
  misc_feature 1: note = Nucleotide linked to an inverted abasic cap
  modified_base 5..6: mod_base = OTHER; note = 2'-deoxy-2'-fluoro modified nucleotide
  modified_base 10..12: mod_base = OTHER; note = 2'-deoxy-2'-fluoro modified nucleotide
  modified_base 15: mod_base = OTHER; note = 2'-deoxy-2'-fluoro modified nucleotide
  modified_base 19: mod_base = OTHER; note = 2'-deoxy-2'-fluoro modified nucleotide
  misc_feature 21: note = Nucleotide linked to an inverted abasic cap
  source 1..21: mol_type = other DNA
  misc_feature 1..4: note = DNA
  misc_feature 5..6: note = RNA
  misc_feature 7..9: note = DNA
  misc_feature 10..12: note = RNA
  misc_feature 13..14: note = DNA
  misc_feature 15: note = RNA
  misc_feature 16..18: note = DNA
  misc_feature 19: note = RNA
  misc_feature 20..21: note = DNA
agggttgaactcaataaactt

SEQ ID NO: 533 - RNA, 21 nt, synthetic construct
  misc_feature 1..21: note = Synthetic
  modified_base 4: mod_base = OTHER; note = 2'-deoxy-2'-fluoro modified nucleotide
  modified_base 5: mod_base = OTHER; note = 2'-O-methyl modified nucleotide
  modified_base 6..7: mod_base = OTHER; note = 2'-deoxy-2'-fluoro modified nucleotide
  modified_base 8..10: mod_base = OTHER; note = 2'-O-methyl modified nucleotide
  modified_base 11..13: mod_base = OTHER; note = 2'-deoxy-2'-fluoro modified nucleotide
  modified_base 15: mod_base = OTHER; note = 2'-O-methyl modified nucleotide
  modified_base 16..19: mod_base = OTHER; note = 2'-deoxy-2'-fluoro modified nucleotide
  modified_base 20..21: mod_base = OTHER; note = 2'-O-methyl modified nucleotide
  source 1..21: mol_type = other RNA
gtttattgagttcaacccttt

SEQ ID NO: 534 - DNA, 21 bp, synthetic construct
  misc_feature 1..21: note = Synthetic
  misc_feature 1..19: note = ribonucleotide unmodified or modified as described for this sequence
  misc_feature 1: note = Nucleotide linked to an inverted abasic cap
  modified_base 2: mod_base = OTHER; note = 2'-deoxy-2'-fluoro modified nucleotide
  modified_base 4: mod_base = OTHER; note = 2'-deoxy-2'-fluoro modified nucleotide
  modified_base 7..8: mod_base = OTHER; note = 2'-deoxy-2'-fluoro modified nucleotide
  modified_base 11: mod_base = OTHER; note = 2'-deoxy-2'-fluoro modified nucleotide
  modified_base 13: mod_base = OTHER; note = 2'-deoxy-2'-fluoro modified nucleotide
  modified_base 15: mod_base = OTHER; note = 2'-deoxy-2'-fluoro modified nucleotide
  modified_base 17..18: mod_base = OTHER; note = 2'-deoxy-2'-fluoro modified nucleotide
  misc_feature 21: note = Nucleotide linked to an inverted abasic cap
  source 1..21: mol_type = other DNA
  misc_feature 1: note = DNA
  misc_feature 2: note = RNA
  misc_feature 3: note = DNA
  misc_feature 4: note = RNA
  misc_feature 5..6: note = DNA
  misc_feature 7..8: note = RNA
  misc_feature 9..10: note = DNA
  misc_feature 11: note = RNA
  misc_feature 12: note = DNA
  misc_feature 13: note = RNA
  misc_feature 14: note = DNA
  misc_feature 15: note = RNA
  misc_feature 16: note = DNA
  misc_feature 17..18: note = RNA
  misc_feature 19..21: note = DNA
gtacaaccagcatatgctatt

SEQ ID NO: 535 - RNA, 21 nt, synthetic construct
  misc_feature 1..21: note = Synthetic
  modified_base 4: mod_base = OTHER; note = 2'-deoxy-2'-fluoro modified nucleotide
  modified_base 5: mod_base = OTHER; note = 2'-O-methyl modified nucleotide
  modified_base 6: mod_base = OTHER; note = 2'-deoxy-2'-fluoro modified nucleotide
  modified_base 7: mod_base = OTHER; note = 2'-O-methyl modified nucleotide
  modified_base 8: mod_base = OTHER; note = 2'-deoxy-2'-fluoro modified nucleotide
  modified_base 9: mod_base = OTHER; note = 2'-O-methyl modified nucleotide
  modified_base 10..11: mod_base = OTHER; note = 2'-deoxy-2'-fluoro modified nucleotide
  modified_base 12..13: mod_base = OTHER; note = 2'-O-methyl modified nucleotide
  modified_base 14..15: mod_base = OTHER; note = 2'-deoxy-2'-fluoro modified nucleotide
  modified_base 16: mod_base = OTHER; note = 2'-O-methyl modified nucleotide
  modified_base 17: mod_base = OTHER; note = 2'-deoxy-2'-fluoro modified nucleotide
  modified_base 18: mod_base = OTHER; note = 2'-O-methyl modified nucleotide
  modified_base 19: mod_base = OTHER; note = 2'-deoxy-2'-fluoro modified nucleotide
  modified_base 20..21: mod_base = OTHER; note = 2'-O-methyl modified nucleotide
  source 1..21: mol_type = other RNA
tagcatatgctggttgtactt

SEQ ID NO: 536 - DNA, 21 bp, synthetic construct
  misc_feature 1..21: note = Synthetic
  misc_feature 1..19: note = ribonucleotide unmodified or modified as described for this sequence
  misc_feature 1: note = Nucleotide linked to an inverted abasic cap
  modified_base 1: mod_base = OTHER; note = 2'-deoxy-2'-fluoro modified nucleotide
  modified_base 5: mod_base = OTHER; note = 2'-deoxy-2'-fluoro modified nucleotide
  modified_base 11..12: mod_base = OTHER; note = 2'-deoxy-2'-fluoro modified nucleotide
  modified_base 14: mod_base = OTHER; note = 2'-deoxy-2'-fluoro modified nucleotide
  modified_base 17..18: mod_base = OTHER; note = 2'-deoxy-2'-fluoro modified nucleotide
  misc_feature 21: note = Nucleotide linked to an inverted abasic cap
  source 1..21: mol_type = other DNA
  misc_feature 1: note = RNA
  misc_feature 2..4: note = DNA
  misc_feature 5: note = RNA
  misc_feature 6..10: note = DNA
  misc_feature 11..12: note = RNA
  misc_feature 13: note = DNA
  misc_feature 14: note = RNA
  misc_feature 15..16: note = DNA
  misc_feature 17..18: note = RNA
  misc_feature 19..21: note = DNA
cggacgaaagccatggttgtt

SEQ ID NO: 537 - RNA, 21 nt, synthetic construct
  misc_feature 1..21: note = Synthetic
  modified_base 4..5: mod_base = OTHER; note = 2'-deoxy-2'-fluoro modified nucleotide
  modified_base 6: mod_base = OTHER; note = 2'-O-methyl modified nucleotide
  modified_base 7: mod_base = OTHER; note = 2'-deoxy-2'-fluoro modified nucleotide
  modified_base 8..9: mod_base = OTHER; note = 2'-O-methyl modified nucleotide
  modified_base 10..14: mod_base = OTHER; note = 2'-deoxy-2'-fluoro modified nucleotide
  modified_base 15: mod_base = OTHER; note = 2'-O-methyl modified nucleotide
  modified_base 16..18: mod_base = OTHER; note = 2'-deoxy-2'-fluoro modified nucleotide
  modified_base 19..21: mod_base = OTHER; note = 2'-O-methyl modified nucleotide
  source 1..21: mol_type = other RNA
caaccatggctttcgtccgtt

SEQ ID NO: 538 - DNA, 21 bp, synthetic construct
  misc_feature 1..21: note = Synthetic
  misc_feature 1..19: note = ribonucleotide unmodified or modified as described for this sequence
  misc_feature 1: note = Nucleotide linked to an inverted abasic cap
  modified_base 3..6: mod_base = OTHER; note = 2'-deoxy-2'-fluoro modified nucleotide
  modified_base 8..10: mod_base = OTHER; note = 2'-deoxy-2'-fluoro modified nucleotide
  modified_base 12: mod_base = OTHER; note = 2'-deoxy-2'-fluoro modified nucleotide
  modified_base 14..16: mod_base = OTHER; note = 2'-deoxy-2'-fluoro modified nucleotide
  misc_feature 21: note = Nucleotide linked to an inverted abasic cap
  source 1..21: mol_type = other DNA
  misc_feature 1..2: note = DNA
  misc_feature 3..6: note = RNA
  misc_feature 7: note = DNA
  misc_feature 8..10: note = RNA
  misc_feature 11: note = DNA
  misc_feature 12: note = RNA
  misc_feature 13: note = DNA
  misc_feature 14..16: note = RNA
  misc_feature 17..21: note = DNA
gactctacttgtatttaaatt

SEQ ID NO: 539 - RNA, 21 nt, synthetic construct
  misc_feature 1..21: note = Synthetic
  modified_base 4..6: mod_base = OTHER; note = 2'-O-methyl modified nucleotide
  modified_base 7: mod_base = OTHER; note = 2'-deoxy-2'-fluoro modified nucleotide
  modified_base 8: mod_base = OTHER; note = 2'-O-methyl modified nucleotide
  modified_base 9: mod_base = OTHER; note = 2'-deoxy-2'-fluoro modified nucleotide
  modified_base 10..12: mod_base = OTHER; note = 2'-O-methyl modified nucleotide
  modified_base 13: mod_base = OTHER; note = 2'-deoxy-2'-fluoro modified nucleotide
  modified_base 15..17: mod_base = OTHER; note = 2'-O-methyl modified nucleotide
  modified_base 18..19: mod_base = OTHER; note = 2'-deoxy-2'-fluoro modified nucleotide
  modified_base 20..21: mod_base = OTHER; note = 2'-O-methyl modified nucleotide
  source 1..21: mol_type = other RNA
tttaaatacaagtagagtctt

SEQ ID NO: 540 - DNA, 21 bp, synthetic construct
  misc_feature 1..21: note = Synthetic
  misc_feature 1..19: note = ribonucleotide unmodified or modified as described for this sequence
  misc_feature 1: note = Nucleotide linked to an inverted abasic cap
  modified_base 2: mod_base = OTHER; note = 2'-deoxy-2'-fluoro modified nucleotide
  modified_base 5..11: mod_base = OTHER; note = 2'-deoxy-2'-fluoro modified nucleotide
  modified_base 14: mod_base = OTHER; note = 2'-deoxy-2'-fluoro modified nucleotide
  misc_feature 21: note = Nucleotide linked to an inverted abasic cap
  source 1..21: mol_type = other DNA
  misc_feature 1: note = DNA
  misc_feature 2: note = RNA
  misc_feature 3..4: note = DNA
  misc_feature 5..11: note = RNA
  misc_feature 12..13: note = DNA
  misc_feature 14: note = RNA
  misc_feature 15..21: note = DNA
acgacttcctcggcaaggatt

SEQ ID NO: 541 - RNA, 21 nt, synthetic construct
  misc_feature 1..21: note = Synthetic
  modified_base 4..5: mod_base = OTHER; note = 2'-deoxy-2'-fluoro modified nucleotide
  modified_base 6: mod_base = OTHER; note = 2'-O-methyl modified nucleotide
  modified_base 7..8: mod_base = OTHER; note = 2'-deoxy-2'-fluoro modified nucleotide
  modified_base 9..13: mod_base = OTHER; note = 2'-O-methyl modified nucleotide
  modified_base 15: mod_base = OTHER; note = 2'-O-methyl modified nucleotide
  modified_base 16..17: mod_base = OTHER; note = 2'-deoxy-2'-fluoro modified nucleotide
  modified_base 18: mod_base = OTHER; note = 2'-O-methyl modified nucleotide
  modified_base 19: mod_base = OTHER; note = 2'-deoxy-2'-fluoro modified nucleotide
  modified_base 20..21: mod_base = OTHER; note = 2'-O-methyl modified nucleotide
  source 1..21: mol_type = other RNA
tccttgccgaggaagtcgttt

SEQ ID NO: 542 - DNA, 21 bp, synthetic construct
  misc_feature 1..21: note = Synthetic
  misc_feature 1..19: note = ribonucleotide unmodified or modified as described for this sequence
  misc_feature 1: note = Nucleotide linked to an inverted abasic cap
  modified_base 2..3: mod_base = OTHER; note = 2'-deoxy-2'-fluoro modified nucleotide
  modified_base 6: mod_base = OTHER; note = 2'-deoxy-2'-fluoro modified nucleotide
  modified_base 9..10: mod_base = OTHER; note = 2'-deoxy-2'-fluoro modified nucleotide
  modified_base 13: mod_base = OTHER; note = 2'-deoxy-2'-fluoro modified nucleotide
  modified_base 16..17: mod_base = OTHER; note = 2'-deoxy-2'-fluoro modified nucleotide
  misc_feature 21: note = Nucleotide linked to an inverted abasic cap
  source 1..21: mol_type = other DNA
  misc_feature 1: note = DNA
  misc_feature 2..3: note = RNA
  misc_feature 4..5: note = DNA
  misc_feature 6: note = RNA
  misc_feature 7..8: note = DNA
  misc_feature 9..10: note = RNA
  misc_feature 11..12: note = DNA
  misc_feature 13: note = RNA
  misc_feature 14..15: note = DNA
  misc_feature 16..17: note = RNA
  misc_feature 18..21: note = DNA
gccagtgactgatgattaatt

SEQ ID NO: 543 - RNA, 21 nt, synthetic construct
  misc_feature 1..21: note = Synthetic
  modified_base 4: mod_base = OTHER; note = 2'-O-methyl modified nucleotide
  modified_base 5..6: mod_base = OTHER; note = 2'-deoxy-2'-fluoro modified nucleotide
  modified_base 7: mod_base = OTHER; note = 2'-O-methyl modified nucleotide
  modified_base 8..9: mod_base = OTHER; note = 2'-deoxy-2'-fluoro modified nucleotide
  modified_base 10..11: mod_base = OTHER; note = 2'-O-methyl modified nucleotide
  modified_base 12..13: mod_base = OTHER; note = 2'-deoxy-2'-fluoro modified nucleotide
  modified_base 15..16: mod_base = OTHER; note = 2'-deoxy-2'-fluoro modified nucleotide
  modified_base 17..18: mod_base = OTHER; note = 2'-O-methyl modified nucleotide
  modified_base 19: mod_base = OTHER; note = 2'-deoxy-2'-fluoro modified nucleotide
  modified_base 20..21: mod_base = OTHER; note = 2'-O-methyl modified nucleotide
  source 1..21: mol_type = other RNA
ttaatcatcagtcactggctt

SEQ ID NO: 544 - DNA, 21 bp, synthetic construct
  misc_feature 1..21: note = Synthetic
  misc_feature 1..19: note = ribonucleotide unmodified or modified as described for this sequence
  misc_feature 1: note = Nucleotide linked to an inverted abasic cap
  modified_base 2..3: mod_base = OTHER; note = 2'-deoxy-2'-fluoro modified nucleotide
  modified_base 8: mod_base = OTHER; note = 2'-deoxy-2'-fluoro modified nucleotide
  modified_base 12: mod_base = OTHER; note = 2'-deoxy-2'-fluoro modified nucleotide
  modified_base 18: mod_base = OTHER; note = 2'-deoxy-2'-fluoro modified nucleotide
  misc_feature 21: note = Nucleotide linked to an inverted abasic cap
  source 1..21: mol_type = other DNA
  misc_feature 1: note = DNA
  misc_feature 2..3: note = RNA
  misc_feature 4..7: note = DNA
  misc_feature 8: note = RNA
  misc_feature 9..11: note = DNA
  misc_feature 12: note = RNA
  misc_feature 13..17: note = DNA
  misc_feature 18: note = RNA
  misc_feature 19..21: note = DNA
gccaaggtaagtggaggtatt

SEQ ID NO: 545 - RNA, 21 nt, synthetic construct
  misc_feature 1..21: note = Synthetic
  modified_base 4..7: mod_base = OTHER; note = 2'-deoxy-2'-fluoro modified nucleotide
  modified_base 8: mod_base = OTHER; note = 2'-O-methyl modified nucleotide
  modified_base 9..11: mod_base = OTHER; note = 2'-deoxy-2'-fluoro modified nucleotide
  modified_base 12: mod_base = OTHER; note = 2'-O-methyl modified nucleotide
  modified_base 13..16: mod_base = OTHER; note = 2'-deoxy-2'-fluoro modified nucleotide
  modified_base 17..18: mod_base = OTHER; note = 2'-O-methyl modified nucleotide
  modified_base 19: mod_base = OTHER; note = 2'-deoxy-2'-fluoro modified nucleotide
  modified_base 20..21: mod_base = OTHER; note = 2'-O-methyl modified nucleotide
  source 1..21: mol_type = other RNA
tacctccacttaccttggctt

SEQ ID NO: 546 - DNA, 21 bp, synthetic construct
  misc_feature 1..21: note = Synthetic
  misc_feature 1..19: note = ribonucleotide unmodified or modified as described for this sequence
  misc_feature 1: note = Nucleotide linked to an inverted abasic cap
  modified_base 3: mod_base = OTHER; note = 2'-deoxy-2'-fluoro modified nucleotide
  modified_base 5: mod_base = OTHER; note = 2'-deoxy-2'-fluoro modified nucleotide
  modified_base 11..12: mod_base = OTHER; note = 2'-deoxy-2'-fluoro modified nucleotide
  modified_base 16..18: mod_base = OTHER; note = 2'-deoxy-2'-fluoro modified nucleotide
  misc_feature 21: note = Nucleotide linked to an inverted abasic cap
  source 1..21: mol_type = other DNA
  misc_feature 1..2: note = DNA
  misc_feature 3: note = RNA
  misc_feature 4: note = DNA
  misc_feature 5: note = RNA
  misc_feature 6..10: note = DNA
  misc_feature 11..12: note = RNA
  misc_feature 13..15: note = DNA
  misc_feature 16..18: note = RNA
  misc_feature 19..21: note = DNA
ggtgtgagggttgaactcatt

SEQ ID NO: 547 - RNA, 21 nt, synthetic construct
  misc_feature 1..21: note = Synthetic
  modified_base 4: mod_base = OTHER; note = 2'-O-methyl modified nucleotide
  modified_base 5..7: mod_base = OTHER; note = 2'-deoxy-2'-fluoro modified nucleotide
  modified_base 8..9: mod_base = OTHER; note = 2'-O-methyl modified nucleotide
  modified_base 10..14: mod_base = OTHER; note = 2'-deoxy-2'-fluoro modified nucleotide
  modified_base 15: mod_base = OTHER; note = 2'-O-methyl modified nucleotide
  modified_base 16: mod_base = OTHER; note = 2'-deoxy-2'-fluoro modified nucleotide
  modified_base 17: mod_base = OTHER; note = 2'-O-methyl modified nucleotide
  modified_base 18..19: mod_base = OTHER; note = 2'-deoxy-2'-fluoro modified nucleotide
  modified_base 20..21: mod_base = OTHER; note = 2'-O-methyl modified nucleotide
  source 1..21: mol_type = other RNA
tgagttcaaccctcacacctt

SEQ ID NO: 548 - RNA, 21 nt, synthetic construct
  misc_feature 1..21: note = Synthetic
  modified_base 4: mod_base = OTHER; note = 2'-deoxy-2'-fluoro modified nucleotide
  modified_base 5: mod_base = OTHER; note = 2'-O-methyl modified nucleotide
  modified_base 6: mod_base = OTHER; note = 2'-deoxy-2'-fluoro modified nucleotide
  modified_base 7..8: mod_base = OTHER; note = 2'-O-methyl modified nucleotide
  modified_base 9: mod_base = OTHER; note = 2'-deoxy-2'-fluoro modified nucleotide
  modified_base 10: mod_base = OTHER; note = 2'-O-methyl modified nucleotide
  modified_base 11: mod_base = OTHER; note = 2'-deoxy-2'-fluoro modified nucleotide
  modified_base 12: mod_base = OTHER; note = 2'-O-methyl modified nucleotide
  modified_base 13: mod_base = OTHER; note = 2'-deoxy-2'-fluoro modified nucleotide
  modified_base 14..21: mod_base = OTHER; note = 2'-O-methyl modified nucleotide
  modified_base 20..21: mod_base = OTHER; note = phosphorothioate linkage
  source 1..21: mol_type = other RNA
tacatgtcacacatcttcctt

SEQ ID NO: 549 - DNA, 21 bp, synthetic construct
  misc_feature 1..21: note = Synthetic
  misc_feature 1..19: note = ribonucleotide unmodified or modified as described for this sequence
  misc_feature 1: note = Nucleotide linked to an inverted abasic cap
  modified_base 4: mod_base = OTHER; note = 2'-deoxy-2'-fluoro modified nucleotide
  modified_base 6: mod_base = OTHER; note = 2'-deoxy-2'-fluoro modified nucleotide
  modified_base 10..11: mod_base = OTHER; note = 2'-deoxy-2'-fluoro modified nucleotide
  modified_base 16: mod_base = OTHER; note = 2'-deoxy-2'-fluoro modified nucleotide
  misc_feature 21: note = Nucleotide linked to an inverted abasic cap
  source 1..21: mol_type = other DNA
  misc_feature 1..3: note = DNA
  misc_feature 4: note = RNA
  misc_feature 5: note = DNA
  misc_feature 6: note = RNA
  misc_feature 7..9: note = DNA
  misc_feature 10..11: note = RNA
  misc_feature 12..15: note = DNA
  misc_feature 16: note = RNA
  misc_feature 17..21: note = DNA
gagcacgagctaaagtaaatt

SEQ ID NO: 550 - RNA, 21 nt, synthetic construct
  misc_feature 1..21: note = Synthetic
  modified_base 4: mod_base = OTHER; note = 2'-O-methyl modified nucleotide
  modified_base 5..8: mod_base = OTHER; note = 2'-deoxy-2'-fluoro modified nucleotide
  modified_base 9..10: mod_base = OTHER; note = 2'-O-methyl modified nucleotide
  modified_base 11..13: mod_base = OTHER; note = 2'-deoxy-2'-fluoro modified nucleotide
  modified_base 15: mod_base = OTHER; note = 2'-deoxy-2'-fluoro modified nucleotide
  modified_base 16: mod_base = OTHER; note = 2'-O-methyl modified nucleotide
  modified_base 17..19: mod_base = OTHER; note = 2'-deoxy-2'-fluoro modified nucleotide
  modified_base 20..21: mod_base = OTHER; note = 2'-O-methyl modified nucleotide
  source 1..21: mol_type = other RNA
tttactttagctcgtgctctt

SEQ ID NO: 551 - DNA, 21 bp, synthetic construct
  misc_feature 1..21: note = Synthetic
  misc_feature 1..19: note = ribonucleotide unmodified or modified as described for this sequence
  misc_feature 1: note = Nucleotide linked to an inverted abasic cap
  modified_base 3..5: mod_base = OTHER; note = 2'-deoxy-2'-fluoro modified nucleotide
  modified_base 8: mod_base = OTHER; note = 2'-deoxy-2'-fluoro modified nucleotide
  modified_base 12..13: mod_base = OTHER; note = 2'-deoxy-2'-fluoro modified nucleotide
  modified_base 15..16: mod_base = OTHER; note = 2'-deoxy-2'-fluoro modified nucleotide
  modified_base 18..19: mod_base = OTHER; note = 2'-deoxy-2'-fluoro modified nucleotide
  misc_feature 21: note = Nucleotide linked to an inverted abasic cap
  source 1..21: mol_type = other DNA
  misc_feature 1..2: note = DNA
  misc_feature 3..5: note = RNA
  misc_feature 6..7: note = DNA
  misc_feature 8: note = RNA
  misc_feature 9..11: note = DNA
  misc_feature 12..13: note = RNA
  misc_feature 14: note = DNA
  misc_feature 15..16: note = RNA
  misc_feature 17: note = DNA
  misc_feature 18..19: note = RNA
  misc_feature 20..21: note = DNA
aatttgatagactgctgtttt

SEQ ID NO: 552 - RNA, 21 nt, synthetic construct
  misc_feature 1..21: note = Synthetic
  modified_base 4..5: mod_base = OTHER; note = 2'-O-methyl modified nucleotide
  modified_base 6: mod_base = OTHER; note = 2'-deoxy-2'-fluoro modified nucleotide
  modified_base 7..8: mod_base = OTHER; note = 2'-O-methyl modified nucleotide
  modified_base 9..11: mod_base = OTHER; note = 2'-deoxy-2'-fluoro modified nucleotide
  modified_base 12: mod_base = OTHER; note = 2'-O-methyl modified nucleotide
  modified_base 13..14: mod_base = OTHER; note = 2'-deoxy-2'-fluoro modified nucleotide
  modified_base 15..17: mod_base = OTHER; note = 2'-O-methyl modified nucleotide
  modified_base 18..19: mod_base = OTHER; note = 2'-deoxy-2'-fluoro modified nucleotide
  modified_base 20..21: mod_base = OTHER; note = 2'-O-methyl modified nucleotide
  source 1..21: mol_type = other RNA
aacagcagtctatcaaatttt

SEQ ID NO: 553 - DNA, 21 bp, synthetic construct
  misc_feature 1..21: note = Synthetic
  misc_feature 1..19: note = ribonucleotide unmodified or modified as described for this sequence
  misc_feature 1: note = Nucleotide linked to an inverted abasic cap
  modified_base 2..3: mod_base = OTHER; note = 2'-deoxy-2'-fluoro modified nucleotide
  modified_base 5: mod_base = OTHER; note = 2'-deoxy-2'-fluoro modified nucleotide
  modified_base 8..9: mod_base = OTHER; note = 2'-deoxy-2'-fluoro modified nucleotide
  modified_base 11..13: mod_base = OTHER; note = 2'-deoxy-2'-fluoro modified nucleotide
  modified_base 15..16: mod_base = OTHER; note = 2'-deoxy-2'-fluoro modified nucleotide
  modified_base 18..19: mod_base = OTHER; note = 2'-deoxy-2'-fluoro modified nucleotide
  misc_feature 21: note = Nucleotide linked to an inverted abasic cap
  source 1..21: mol_type = other DNA
  misc_feature 1: note = DNA
  misc_feature 2..3: note = RNA
  misc_feature 4: note = DNA
  misc_feature 5: note = RNA
  misc_feature 6..7: note = DNA
  misc_feature 8..9: note = RNA
  misc_feature 10: note = DNA
  misc_feature 11..13: note = RNA
  misc_feature 14: note = DNA
  misc_feature 15..16: note = RNA
  misc_feature 17: note = DNA
  misc_feature 18..19: note = RNA
  misc_feature 20..21: note = DNA
gccatggttgcttgttatctt

SEQ ID NO: 554 - RNA, 21 nt, synthetic construct
  misc_feature 1..21: note = Synthetic
  modified_base 4..5: mod_base = OTHER; note = 2'-O-methyl modified nucleotide
  modified_base 6: mod_base = OTHER; note = 2'-deoxy-2'-fluoro modified nucleotide
  modified_base 7..9: mod_base = OTHER; note = 2'-O-methyl modified nucleotide
  modified_base 10: mod_base = OTHER; note = 2'-deoxy-2'-fluoro modified nucleotide
  modified_base 11..12: mod_base = OTHER; note = 2'-O-methyl modified nucleotide
  modified_base 13..14: mod_base = OTHER; note = 2'-deoxy-2'-fluoro modified nucleotide
  modified_base 15: mod_base = OTHER; note = 2'-O-methyl modified nucleotide
  modified_base 16: mod_base = OTHER; note = 2'-deoxy-2'-fluoro modified nucleotide
  modified_base 17..18: mod_base = OTHER; note = 2'-O-methyl modified nucleotide
  modified_base 19: mod_base = OTHER; note = 2'-deoxy-2'-fluoro modified nucleotide
  modified_base 20..21: mod_base = OTHER; note = 2'-O-methyl modified nucleotide
  source 1..21: mol_type = other RNA
gataacaagcaaccatggctt

SEQ ID NO: 555 - DNA, 21 bp, synthetic construct
  misc_feature 1..21: note = Synthetic
  misc_feature 1..19: note = ribonucleotide unmodified or modified as described for this sequence
  misc_feature 1: note = Nucleotide linked to an inverted abasic cap
  modified_base 1..2: mod_base = OTHER; note = 2'-deoxy-2'-fluoro modified nucleotide
  modified_base 4..5: mod_base = OTHER; note = 2'-deoxy-2'-fluoro modified nucleotide
  modified_base 7: mod_base = OTHER; note = 2'-deoxy-2'-fluoro modified nucleotide
  modified_base 10..14: mod_base = OTHER; note = 2'-deoxy-2'-fluoro modified nucleotide
  modified_base 16: mod_base = OTHER; note = 2'-deoxy-2'-fluoro modified nucleotide
  misc_feature 21: note = Nucleotide linked to an inverted abasic cap
  source 1..21: mol_type = other DNA
  misc_feature 1..2: note = RNA
  misc_feature 3: note = DNA
  misc_feature 4..5: note = RNA
  misc_feature 6: note = DNA
  misc_feature 7: note = RNA
  misc_feature 8..9: note = DNA
  misc_feature 10..14: note = RNA
  misc_feature 15: note = DNA
  misc_feature 16: note = RNA
  misc_feature 17..21: note = DNA
ccgtcgcaaccctcatgaatt

SEQ ID NO: 556 - RNA, 21 nt, synthetic construct
  misc_feature 1..21: note = Synthetic
  modified_base 4: mod_base = OTHER; note = 2'-O-methyl modified nucleotide
  modified_base 5: mod_base = OTHER; note = 2'-deoxy-2'-fluoro modified nucleotide
  modified_base 6..10: mod_base = OTHER; note = 2'-O-methyl modified nucleotide
  modified_base 11..12: mod_base = OTHER; note = 2'-deoxy-2'-fluoro modified nucleotide
  modified_base 13: mod_base = OTHER; note = 2'-O-methyl modified nucleotide
  modified_base 14: mod_base = OTHER; note = 2'-deoxy-2'-fluoro modified nucleotide
  modified_base 15..16: mod_base = OTHER; note = 2'-O-methyl modified nucleotide
  modified_base 17: mod_base = OTHER; note = 2'-deoxy-2'-fluoro modified nucleotide
  modified_base 18..21: mod_base = OTHER; note = 2'-O-methyl modified nucleotide
  source 1..21: mol_type = other RNA
ttcatgagggttgcgacggtt

SEQ ID NO: 557 - DNA, 21 bp, synthetic construct
  misc_feature 1..21: note = Synthetic
  misc_feature 1..19: note = ribonucleotide unmodified or modified as described for this sequence
  misc_feature 1: note = Nucleotide linked to an inverted abasic cap
  modified_base 1: mod_base = OTHER; note = 2'-deoxy-2'-fluoro modified nucleotide
  modified_base 4: mod_base = OTHER; note = 2'-deoxy-2'-fluoro modified nucleotide
  modified_base 6: mod_base = OTHER; note = 2'-deoxy-2'-fluoro modified nucleotide
  modified_base 8: mod_base = OTHER; note = 2'-deoxy-2'-fluoro modified nucleotide
  modified_base 10..11: mod_base = OTHER; note = 2'-deoxy-2'-fluoro modified nucleotide
  modified_base 13: mod_base = OTHER; note = 2'-deoxy-2'-fluoro modified nucleotide
  modified_base 18: mod_base = OTHER; note = 2'-deoxy-2'-fluoro modified nucleotide
  misc_feature 21: note = Nucleotide linked to an inverted abasic cap
  source 1..21: mol_type = other DNA
  misc_feature 1: note = RNA
  misc_feature 2..3: note = DNA
  misc_feature 4: note = RNA
  misc_feature 5: note = DNA
  misc_feature 6: note = RNA
  misc_feature 7: note = DNA
  misc_feature 8: note = RNA
  misc_feature 9: note = DNA
  misc_feature 10..11: note = RNA
  misc_feature 12: note = DNA
  misc_feature 13: note = RNA
  misc_feature 14..17: note = DNA
  misc_feature 18: note = RNA
  misc_feature 19..21: note = DNA
cagcatatgctacaaggtatt

SEQ ID NO: 558 - RNA, 21 nt, synthetic construct
  misc_feature 1..21: note = Synthetic
  modified_base 4..6: mod_base = OTHER; note = 2'-deoxy-2'-fluoro modified nucleotide
  modified_base 7: mod_base = OTHER; note = 2'-O-methyl modified nucleotide
  modified_base 8: mod_base = OTHER; note = 2'-deoxy-2'-fluoro modified nucleotide
  modified_base 9..10: mod_base = OTHER; note = 2'-O-methyl modified nucleotide
  modified_base 11: mod_base = OTHER; note = 2'-deoxy-2'-fluoro modified nucleotide
  modified_base 12: mod_base = OTHER; note = 2'-O-methyl modified nucleotide
  modified_base 13: mod_base = OTHER; note = 2'-deoxy-2'-fluoro modified nucleotide
  modified_base 14: mod_base = OTHER; note = 2'-O-methyl modified nucleotide
  modified_base 15: mod_base = OTHER; note = 2'-deoxy-2'-fluoro modified nucleotide
  modified_base 16: mod_base = OTHER; note = 2'-O-methyl modified nucleotide
  modified_base 17..18: mod_base = OTHER; note = 2'-deoxy-2'-fluoro modified nucleotide
  modified_base 19..21: mod_base = OTHER; note = 2'-O-methyl modified nucleotide
  source 1..21: mol_type = other RNA
taccttgtagcatatgctgtt

SEQ ID NO: 559 - DNA, 21 bp, synthetic construct
  misc_feature 1..21: note = Synthetic
  misc_feature 1..19: note = ribonucleotide unmodified or modified as described for this sequence
  misc_feature 1: note = Nucleotide linked to an inverted abasic cap
  modified_base 4: mod_base = OTHER; note = 2'-deoxy-2'-fluoro modified nucleotide
  modified_base 6: mod_base = OTHER; note = 2'-deoxy-2'-fluoro modified nucleotide
  modified_base 12..13: mod_base = OTHER; note = 2'-deoxy-2'-fluoro modified nucleotide
  modified_base 17..19: mod_base = OTHER; note = 2'-deoxy-2'-fluoro modified nucleotide
  misc_feature 21: note = Nucleotide linked to an inverted abasic cap
  source 1..21: mol_type = other DNA
  misc_feature 1..3: note = DNA
  misc_feature 4: note = RNA
  misc_feature 5: note = DNA
  misc_feature 6: note = RNA
  misc_feature 7..11: note = DNA
  misc_feature 12..13: note = RNA
  misc_feature 14..16: note = DNA
  misc_feature 17..19: note = RNA
  misc_feature 20..21: note = DNA
aggtgtgagggttgaactctt

SEQ ID NO: 560 - RNA, 21 nt, synthetic construct
  misc_feature 1..21: note = Synthetic
  modified_base 4..6: mod_base = OTHER; note = 2'-deoxy-2'-fluoro modified nucleotide
  modified_base 7..8: mod_base = OTHER; note = 2'-O-methyl modified nucleotide
  modified_base 9..13: mod_base = OTHER; note = 2'-deoxy-2'-fluoro modified nucleotide
  modified_base 15: mod_base = OTHER; note = 2'-deoxy-2'-fluoro modified nucleotide
  modified_base 16: mod_base = OTHER; note = 2'-O-methyl modified nucleotide
  modified_base 17..19: mod_base = OTHER; note = 2'-deoxy-2'-fluoro modified nucleotide
  modified_base 20..21: mod_base = OTHER; note = 2'-O-methyl modified nucleotide
  source 1..21: mol_type = other RNA
gagttcaaccctcacaccttt

SEQ ID NO: 561 - RNA, 21 nt, synthetic construct
  misc_feature 1..21: note = Synthetic
  modified_base 7: mod_base = OTHER; note = 2'-O-methyl modified nucleotide
  modified_base 10: mod_base = OTHER; note = 2'-O-methyl modified nucleotide
  modified_base 12: mod_base = OTHER; note = 2'-O-methyl modified nucleotide
  modified_base 16: mod_base = OTHER; note = 2'-O-methyl modified nucleotide
  modified_base 18: mod_base = OTHER; note = 2'-O-methyl modified nucleotide
  modified_base 20..21: mod_base = OTHER; note = 2'-O-methyl modified nucleotide
  modified_base 20..21: mod_base = OTHER; note = phosphorothioate linkage
  source 1..21: mol_type = other RNA
ttaagataatatatacatgtt

SEQ ID NO: 562 - RNA, 23 nt, synthetic construct
  misc_feature 1..23: note = Synthetic
  modified_base 1..2: mod_base = OTHER; note = 2'-O-methyl modified nucleotide
  modified_base 11: mod_base = OTHER; note = 2'-O-methyl modified nucleotide
  modified_base 17: mod_base = OTHER; note = 2'-O-methyl modified nucleotide
  modified_base 20: mod_base = OTHER; note = 2'-O-methyl modified nucleotide
  modified_base 22..23: mod_base = OTHER; note = 2'-O-methyl modified nucleotide
  modified_base 22..23: mod_base = OTHER; note = phosphorothioate linkage
  source 1..23: mol_type = other RNA
aatttgggttcaatgtcagcaaa

SEQ ID NO: 563 - RNA, 21 nt, synthetic construct
  misc_feature 1..21: note = Synthetic
  modified_base 5: mod_base = OTHER; note = 2'-O-methyl modified nucleotide
  modified_base 7..8: mod_base = OTHER; note = 2'-O-methyl modified nucleotide
  modified_base 10: mod_base = OTHER; note = 2'-O-methyl modified nucleotide
  modified_base 12: mod_base = OTHER; note = 2'-O-methyl modified nucleotide
  modified_base 15..21: mod_base = OTHER; note = 2'-O-methyl modified nucleotide
  modified_base 20..21: mod_base = OTHER; note = phosphorothioate linkage
  source 1..21: mol_type = other RNA
tacatgtcacacatcttcctt

SEQ ID NO: 564 - DNA, 21 bp, synthetic construct
  misc_feature 1..21: note = Synthetic
  misc_feature 1..19: note = ribonucleotide unmodified or modified as described for this sequence
  misc_feature 1: note = Nucleotide linked to an inverted abasic cap
  modified_base 4..5: mod_base = OTHER; note = 2'-deoxy-2'-fluoro modified nucleotide
  modified_base 10: mod_base = OTHER; note = 2'-deoxy-2'-fluoro modified nucleotide
  modified_base 15: mod_base = OTHER; note = 2'-deoxy-2'-fluoro modified nucleotide
  modified_base 17..19: mod_base = OTHER; note = 2'-deoxy-2'-fluoro modified nucleotide
  misc_feature 21: note = Nucleotide linked to an inverted abasic cap
  source 1..21: mol_type = other DNA
  misc_feature 1..3: note = DNA
  misc_feature 4..5: note = RNA
  misc_feature 6..9: note = DNA
  misc_feature 10: note = RNA
  misc_feature 11..14: note = DNA
  misc_feature 15: note = RNA
  misc_feature 16: note = DNA
  misc_feature 17..19: note = RNA
  misc_feature 20..21: note = DNA
gagctaaagtaaaatatcttt

SEQ ID NO: 565 - RNA, 21 nt, synthetic construct
  misc_feature 1..21: note = Synthetic
  modified_base 4: mod_base = OTHER; note = 2'-deoxy-2'-fluoro modified nucleotide
  modified_base 5: mod_base = OTHER; note = 2'-O-methyl modified nucleotide
  modified_base 6..9: mod_base = OTHER; note = 2'-deoxy-2'-fluoro modified nucleotide
  modified_base 10: mod_base = OTHER; note = 2'-O-methyl modified nucleotide
  modified_base 11..14: mod_base = OTHER; note = 2'-deoxy-2'-fluoro modified nucleotide
  modified_base 15..16: mod_base = OTHER; note = 2'-O-methyl modified nucleotide
  modified_base 17..19: mod_base = OTHER; note = 2'-deoxy-2'-fluoro modified nucleotide
  modified_base 20..21: mod_base = OTHER; note = 2'-O-methyl modified nucleotide
  source 1..21: mol_type = other RNA
agatattttactttagctctt

SEQ ID NO: 566 - DNA, 21 bp, synthetic construct
  misc_feature 1..21: note = Synthetic
  misc_feature 1..19: note = ribonucleotide unmodified or modified as described for this sequence
  misc_feature 1: note = Nucleotide linked to an inverted abasic cap
  modified_base 1: mod_base = OTHER; note = 2'-deoxy-2'-fluoro modified nucleotide
  modified_base 8..9: mod_base = OTHER; note = 2'-deoxy-2'-fluoro modified nucleotide
  modified_base 13: mod_base = OTHER; note = 2'-deoxy-2'-fluoro modified nucleotide
  modified_base 16..17: mod_base = OTHER; note = 2'-deoxy-2'-fluoro modified nucleotide
  modified_base 19: mod_base = OTHER; note = 2'-deoxy-2'-fluoro modified nucleotide
  misc_feature 21: note = Nucleotide linked to an inverted abasic cap
  source 1..21: mol_type = other DNA
  misc_feature 1: note = RNA
  misc_feature 2..7: note = DNA
  misc_feature 8..9: note = RNA
  misc_feature 10..12: note = DNA
  misc_feature 13: note = RNA
  misc_feature 14..15: note = DNA
  misc_feature 16..17: note = RNA
  misc_feature 18: note = DNA
  misc_feature 19: note = RNA
  misc_feature 20..21: note = DNA
cgggaagctgggcagctactt

SEQ ID NO: 567 - RNA, 21 nt, synthetic construct
  misc_feature 1..21: note = Synthetic
  modified_base 4: mod_base = OTHER; note = 2'-O-methyl modified nucleotide
  modified_base 5..6: mod_base = OTHER; note = 2'-deoxy-2'-fluoro modified nucleotide
  modified_base 7: mod_base = OTHER; note = 2'-O-methyl modified nucleotide
  modified_base 8..10: mod_base = OTHER; note = 2'-deoxy-2'-fluoro modified nucleotide
  modified_base 11..12: mod_base = OTHER; note = 2'-O-methyl modified nucleotide
  modified_base 13..18: mod_base = OTHER; note = 2'-deoxy-2'-fluoro modified nucleotide
  modified_base 19..21: mod_base = OTHER; note = 2'-O-methyl modified nucleotide
  source 1..21: mol_type = other RNA
gtagctgcccagcttcccgtt

SEQ ID NO: 568 - DNA, 21 bp, synthetic construct
  misc_feature 1..21: note = Synthetic
  misc_feature 1..19: note = ribonucleotide unmodified or modified as described for this sequence
  misc_feature 1: note = Nucleotide linked to an inverted abasic cap
  modified_base 3..4: mod_base = OTHER; note = 2'-deoxy-2'-fluoro modified nucleotide
  modified_base 6..8: mod_base = OTHER; note = 2'-deoxy-2'-fluoro modified nucleotide
  modified_base 10..11: mod_base = OTHER; note = 2'-deoxy-2'-fluoro modified nucleotide
  modified_base 13..15: mod_base = OTHER; note = 2'-deoxy-2'-fluoro modified nucleotide
  modified_base 19: mod_base = OTHER; note = 2'-deoxy-2'-fluoro modified nucleotide
  misc_feature 21: note = Nucleotide linked to an inverted abasic cap
  source 1..21: mol_type = other DNA
  misc_feature 1..2: note = DNA
  misc_feature 3..4: note = RNA
  misc_feature 5: note = DNA
  misc_feature 6..8: note = RNA
  misc_feature 9: note = DNA
  misc_feature 10..11: note = RNA
  misc_feature 12: note = DNA
  misc_feature 13..15: note = RNA
  misc_feature 16..18: note = DNA
  misc_feature 19: note = RNA
  misc_feature 20..21: note = DNA
ggttgcttgttatccgggctt

SEQ ID NO: 569 - RNA, 21 nt, synthetic construct
  misc_feature 1..21: note = Synthetic
  modified_base 4: mod_base = OTHER; note = 2'-deoxy-2'-fluoro modified nucleotide
  modified_base 5..7: mod_base = OTHER; note = 2'-O-methyl modified nucleotide
  modified_base 8: mod_base = OTHER; note = 2'-deoxy-2'-fluoro modified nucleotide
  modified_base 9..10: mod_base = OTHER; note = 2'-O-methyl modified nucleotide
  modified_base 11: mod_base = OTHER; note = 2'-deoxy-2'-fluoro modified nucleotide
  modified_base 12..13: mod_base = OTHER; note = 2'-O-methyl modified nucleotide
  modified_base 15: mod_base = OTHER; note = 2'-deoxy-2'-fluoro modified nucleotide
  modified_base 16..17: mod_base = OTHER; note = 2'-O-methyl modified nucleotide
  modified_base 18..19: mod_base = OTHER; note = 2'-deoxy-2'-fluoro modified nucleotide
  modified_base 20..21: mod_base = OTHER; note = 2'-O-methyl modified nucleotide
  source 1..21: mol_type = other RNA
gcccggataacaagcaacctt

SEQ ID NO: 570 - DNA, 21 bp, synthetic construct
  misc_feature 1..21: note = Synthetic
  misc_feature 1..19: note = ribonucleotide unmodified or modified as described for this sequence
  misc_feature 1: note = Nucleotide linked to an inverted abasic cap
  modified_base 1: mod_base = OTHER; note = 2'-deoxy-2'-fluoro modified nucleotide
  modified_base 3: mod_base = OTHER; note = 2'-deoxy-2'-fluoro modified nucleotide
  modified_base 6..8: mod_base = OTHER; note = 2'-deoxy-2'-fluoro modified nucleotide
  modified_base 10..12: mod_base = OTHER; note = 2'-deoxy-2'-fluoro modified nucleotide
  modified_base 16..17: mod_base = OTHER; note = 2'-deoxy-2'-fluoro modified nucleotide
  misc_feature 21: note = Nucleotide linked to an inverted abasic cap
  source 1..21: mol_type = other DNA
  misc_feature 1: note = RNA
  misc_feature 2: note = DNA
  misc_feature 3: note = RNA
  misc_feature 4..5: note = DNA
  misc_feature 6..8: note = RNA
  misc_feature 9: note = DNA
  misc_feature 10..12: note = RNA
  misc_feature 13..15: note = DNA
  misc_feature 16..17: note = RNA
  misc_feature 18..21: note = DNA
tacaatttatctaaactgatt

SEQ ID NO: 571 - RNA, 21 nt, synthetic construct
  misc_feature 1..21: note = Synthetic
  modified_base 4: mod_base = OTHER; note = 2'-O-methyl modified nucleotide
  modified_base 5..7: mod_base = OTHER; note = 2'-deoxy-2'-fluoro modified nucleotide
  modified_base 8..10: mod_base = OTHER; note = 2'-O-methyl modified nucleotide
  modified_base 11: mod_base = OTHER; note = 2'-deoxy-2'-fluoro modified nucleotide
  modified_base 12..13: mod_base = OTHER; note = 2'-O-methyl modified nucleotide
  modified_base 15..16: mod_base = OTHER; note = 2'-deoxy-2'-fluoro modified nucleotide
  modified_base 17: mod_base = OTHER; note = 2'-O-methyl modified nucleotide
  modified_base 18: mod_base = OTHER; note = 2'-deoxy-2'-fluoro modified nucleotide
  modified_base 19..21: mod_base = OTHER; note = 2'-O-methyl modified nucleotide
  source 1..21: mol_type = other RNA
tcagtttagataaattgtatt

SEQ ID NO: 572 - RNA, 21 nt, synthetic construct
  misc_feature 1..21: note = Synthetic
  misc_feature 1: note = Nucleotide linked to an inverted abasic cap
  modified_base 2..3: mod_base = OTHER; note = 2'-O-methyl modified nucleotide
  modified_base 5: mod_base = OTHER; note = 2'-O-methyl modified nucleotide
  modified_base 8..12: mod_base = OTHER; note = 2'-O-methyl modified nucleotide
  modified_base 14: mod_base = OTHER; note = 2'-O-methyl modified nucleotide
  modified_base 19..21: mod_base = OTHER; note = 2'-O-methyl modified nucleotide
  modified_base 20..21: mod_base = OTHER; note = phosphorothioate linkage
  misc_feature 21: note = Nucleotide linked to an inverted abasic cap
  source 1..21: mol_type = other RNA
gtcgcaaccctcatgaagtga

SEQ ID NO: 573 - RNA, 23 nt, synthetic construct
  misc_feature 1..23: note = Synthetic
  modified_base 1..2: mod_base = OTHER; note = 2'-O-methyl modified nucleotide
  modified_base 7: mod_base = OTHER; note = 2'-O-methyl modified nucleotide
  modified_base 22..23: mod_base = OTHER; note = 2'-O-methyl modified nucleotide
  source 1..23: mol_type = other RNA
gtacttcatgagggttgcgacgg

SEQ ID NO: 574 - DNA, 21 bp, synthetic construct
  misc_feature 1..21: note = Synthetic
  misc_feature 1..19: note = ribonucleotide unmodified or modified as described for this sequence
  misc_feature 1: note = Nucleotide linked to an inverted abasic cap
  modified_base 3..9: mod_base = OTHER; note = 2'-deoxy-2'-fluoro modified nucleotide
  modified_base 12: mod_base = OTHER; note = 2'-deoxy-2'-fluoro modified nucleotide
  misc_feature 21: note = Nucleotide linked to an inverted abasic cap
  source 1..21: mol_type = other DNA
  misc_feature 1..2: note = DNA
  misc_feature 3..9: note = RNA
  misc_feature 10..11: note = DNA
  misc_feature 12: note = RNA
  misc_feature 13..21: note = DNA
gacttcctcggcaaggagatt

SEQ ID NO: 575 - RNA, 21 nt, synthetic construct
  misc_feature 1..21: note = Synthetic
  modified_base 4..7: mod_base = OTHER; note = 2'-deoxy-2'-fluoro modified nucleotide
  modified_base 8: mod_base = OTHER; note = 2'-O-methyl modified nucleotide
  modified_base 9..10: mod_base = OTHER; note = 2'-deoxy-2'-fluoro modified nucleotide
  modified_base 11..13: mod_base = OTHER; note = 2'-O-methyl modified nucleotide
  modified_base 15..17: mod_base = OTHER; note = 2'-O-methyl modified nucleotide
  modified_base 18..19: mod_base = OTHER; note = 2'-deoxy-2'-fluoro modified nucleotide
  modified_base 20..21: mod_base = OTHER; note = 2'-O-methyl modified nucleotide
  source 1..21: mol_type = other RNA
tctccttgccgaggaagtctt

SEQ ID NO: 576 - DNA, 21 bp, synthetic construct
  misc_feature 1..21: note = Synthetic
  misc_feature 1..19: note = ribonucleotide unmodified or modified as described for this sequence
  misc_feature 1: note = Nucleotide linked to an inverted abasic cap
  modified_base 1..2: mod_base = OTHER; note = 2'-deoxy-2'-fluoro modified nucleotide
  modified_base 4..5: mod_base = OTHER; note = 2'-deoxy-2'-fluoro modified nucleotide
  modified_base 9..10: mod_base = OTHER; note = 2'-deoxy-2'-fluoro modified nucleotide
  modified_base 12..14: mod_base = OTHER; note = 2'-deoxy-2'-fluoro modified nucleotide
  modified_base 16: mod_base = OTHER; note = 2'-deoxy-2'-fluoro modified nucleotide
  misc_feature 21: note = Nucleotide linked to an inverted abasic cap
  source 1..21: mol_type = other DNA
  misc_feature 1..2: note = RNA
  misc_feature 3: note = DNA
  misc_feature 4..5: note = RNA
  misc_feature 6..8: note = DNA
  misc_feature 9..10: note = RNA
  misc_feature 11: note = DNA
  misc_feature 12..14: note = RNA
  misc_feature 15: note = DNA
  misc_feature 16: note = RNA
  misc_feature 17..21: note = DNA
ccattgggctgctcatgagtt

SEQ ID NO: 577 - RNA, 21 nt, synthetic construct
  misc_feature 1..21: note = Synthetic
  modified_base 4: mod_base = OTHER; note = 2'-O-methyl modified nucleotide
  modified_base 5: mod_base = OTHER; note = 2'-deoxy-2'-fluoro modified nucleotide
  modified_base 6..8: mod_base = OTHER; note = 2'-O-methyl modified nucleotide
  modified_base 9: mod_base = OTHER; note = 2'-deoxy-2'-fluoro modified nucleotide
  modified_base 10..11: mod_base = OTHER; note = 2'-O-methyl modified nucleotide
  modified_base 12..14: mod_base = OTHER; note = 2'-deoxy-2'-fluoro modified nucleotide
  modified_base 15..16: mod_base = OTHER; note = 2'-O-methyl modified nucleotide
  modified_base 17: mod_base = OTHER; note = 2'-deoxy-2'-fluoro modified nucleotide
  modified_base 18..21: mod_base = OTHER; note = 2'-O-methyl modified nucleotide
  source 1..21: mol_type = other RNA
ctcatgagcagcccaatggtt

SEQ ID NO: 578 - DNA, 21 bp, synthetic construct
  misc_feature 1..21: note = Synthetic
  misc_feature 1..19: note = ribonucleotide unmodified or modified as described for this sequence
  misc_feature 1: note = Nucleotide linked to an inverted abasic cap
  modified_base 4: mod_base = OTHER; note = 2'-deoxy-2'-fluoro modified nucleotide
  modified_base 6..9: mod_base = OTHER; note = 2'-deoxy-2'-fluoro modified nucleotide
  modified_base 12..13: mod_base = OTHER; note = 2'-deoxy-2'-fluoro modified nucleotide
  modified_base 15: mod_base = OTHER; note = 2'-deoxy-2'-fluoro modified nucleotide
  modified_base 18..19: mod_base = OTHER; note = 2'-deoxy-2'-fluoro modified nucleotide
  misc_feature 21: note = Nucleotide linked to an inverted abasic cap
  source 1..21: mol_type = other DNA
  misc_feature 1..3: note = DNA
  misc_feature 4: note = RNA
  misc_feature 5: note = DNA
  misc_feature 6..9: note = RNA
  misc_feature 10..11: note = DNA
  misc_feature 12..13: note = RNA
  misc_feature 14: note = DNA
  misc_feature 15: note = RNA
  misc_feature 16..17: note = DNA
  misc_feature 18..19: note = RNA
  misc_feature 20..21: note = DNA
gagcactttaattacaacttt

SEQ ID NO: 579 - RNA, 21 nt, synthetic construct
  misc_feature 1..21: note = Synthetic
  modified_base 4: mod_base = OTHER; note = 2'-deoxy-2'-fluoro modified nucleotide
  modified_base 5: mod_base = OTHER; note = 2'-O-methyl modified nucleotide
  modified_base 6: mod_base = OTHER; note = 2'-deoxy-2'-fluoro modified nucleotide
  modified_base 7..8: mod_base = OTHER; note = 2'-O-methyl modified nucleotide
  modified_base 9..10: mod_base = OTHER; note = 2'-deoxy-2'-fluoro modified nucleotide
  modified_base 11..14: mod_base = OTHER; note = 2'-O-methyl modified nucleotide
  modified_base 15: mod_base = OTHER; note = 2'-deoxy-2'-fluoro modified nucleotide
  modified_base 16: mod_base = OTHER; note = 2'-O-methyl modified nucleotide
  modified_base 17..19: mod_base = OTHER; note = 2'-deoxy-2'-fluoro modified nucleotide
  modified_base 20..21: mod_base = OTHER; note = 2'-O-methyl modified nucleotide
  source 1..21: mol_type = other RNA
agttgtaattaaagtgctctt

SEQ ID NO: 580 - DNA, 21 bp, synthetic construct
  misc_feature 1..21: note = Synthetic
  misc_feature 1..19: note = ribonucleotide unmodified or modified as described for this sequence
  misc_feature 1: note = Nucleotide linked to an inverted abasic cap
  modified_base 7..9: mod_base = OTHER; note = 2'-deoxy-2'-fluoro modified nucleotide
  modified_base 12..13: mod_base = OTHER; note = 2'-deoxy-2'-fluoro modified nucleotide
  modified_base 15: mod_base = OTHER; note = 2'-deoxy-2'-fluoro modified nucleotide
  misc_feature 21: note = Nucleotide linked to an inverted abasic cap
  source 1..21: mol_type = other DNA
  misc_feature 1..6: note = DNA
  misc_feature 7..9: note = RNA
  misc_feature 10..11: note = DNA
  misc_feature 12..13: note = RNA
  misc_feature 14: note = DNA
  misc_feature 15: note = RNA
  misc_feature 16..21: note = DNA
aaggagcccggctgcgaaatt

SEQ ID NO: 581 - RNA, 21 nt, synthetic construct
  misc_feature 1..21: note = Synthetic
  modified_base 4: mod_base = OTHER; note = 2'-deoxy-2'-fluoro modified nucleotide
  modified_base 5: mod_base = OTHER; note = 2'-O-methyl modified nucleotide
  modified_base 6: mod_base = OTHER; note = 2'-deoxy-2'-fluoro modified nucleotide
  modified_base 7..8: mod_base = OTHER; note = 2'-O-methyl modified nucleotide
  modified_base 9..10: mod_base = OTHER; note = 2'-deoxy-2'-fluoro modified nucleotide
  modified_base 11..13: mod_base = OTHER; note = 2'-O-methyl modified nucleotide
  modified_base 14..19: mod_base = OTHER; note = 2'-deoxy-2'-fluoro modified nucleotide
  modified_base 20..21: mod_base = OTHER; note = 2'-O-methyl modified nucleotide
  source 1..21: mol_type = other RNA
tttcgcagccgggctcctttt

SEQ ID NO: 582 - RNA, 21 nt, synthetic construct
  misc_feature 1..21: note = Synthetic
  modified_base 7: mod_base = OTHER; note = 2'-O-methyl modified nucleotide
  modified_base 16: mod_base = OTHER; note = 2'-O-methyl modified nucleotide
  modified_base 20..21: mod_base = OTHER; note = 2'-O-methyl modified nucleotide
  modified_base 20..21: mod_base = OTHER; note = phosphorothioate linkage
  source 1..21: mol_type = other RNA
aaggtttattgagttcaactt

SEQ ID NO: 583 - DNA, 21 bp, synthetic construct
  misc_feature 1..21: note = Synthetic
  misc_feature 1..19: note = ribonucleotide unmodified or modified as described for this sequence
  misc_feature 1: note = Nucleotide linked to an inverted abasic cap
  modified_base 2: mod_base = OTHER; note = 2'-deoxy-2'-fluoro modified nucleotide
  modified_base 4: mod_base = OTHER; note = 2'-deoxy-2'-fluoro modified nucleotide
  modified_base 6: mod_base = OTHER; note = 2'-deoxy-2'-fluoro modified nucleotide
  modified_base 8: mod_base = OTHER; note = 2'-deoxy-2'-fluoro modified nucleotide
  modified_base 10: mod_base = OTHER; note = 2'-deoxy-2'-fluoro modified nucleotide
  modified_base 12..13: mod_base = OTHER; note = 2'-deoxy-2'-fluoro modified nucleotide
  modified_base 15..18: mod_base = OTHER; note = 2'-deoxy-2'-fluoro modified nucleotide
  misc_feature 21: note = Nucleotide linked to an inverted abasic cap
  source 1..21: mol_type = other DNA
  misc_feature 1: note = DNA
  misc_feature 2: note = RNA
  misc_feature 3: note = DNA
  misc_feature 4: note = RNA
  misc_feature 5: note = DNA
  misc_feature 6: note = RNA
  misc_feature 7: note = DNA
  misc_feature 8: note = RNA
  misc_feature 9: note = DNA
  misc_feature 10: note = RNA
  misc_feature 11: note = DNA
  misc_feature 12..13: note = RNA
  misc_feature 14: note = DNA
  misc_feature 15..18: note = RNA
  misc_feature 19..21: note = DNA
acatgtatatattatcttatt

SEQ ID NO: 584 - RNA, 21 nt, synthetic construct
  misc_feature 1..21: note = Synthetic
  modified_base 4..5: mod_base = OTHER; note = 2'-O-methyl modified nucleotide
  modified_base 6: mod_base = OTHER; note = 2'-deoxy-2'-fluoro modified nucleotide
  modified_base 7..8: mod_base = OTHER; note = 2'-O-methyl modified nucleotide
  modified_base 9: mod_base = OTHER; note = 2'-deoxy-2'-fluoro modified nucleotide
  modified_base 10: mod_base = OTHER; note = 2'-O-methyl modified nucleotide
  modified_base 11: mod_base = OTHER; note = 2'-deoxy-2'-fluoro modified nucleotide
  modified_base 12: mod_base = OTHER; note = 2'-O-methyl modified nucleotide
  modified_base 13: mod_base = OTHER; note = 2'-deoxy-2'-fluoro modified nucleotide
  modified_base 15: mod_base = OTHER; note = 2'-deoxy-2'-fluoro modified nucleotide
  modified_base 16: mod_base = OTHER; note = 2'-O-methyl modified nucleotide
  modified_base 17: mod_base = OTHER; note = 2'-deoxy-2'-fluoro modified nucleotide
  modified_base 18: mod_base = OTHER; note = 2'-O-methyl modified nucleotide
  modified_base 19: mod_base = OTHER; note = 2'-deoxy-2'-fluoro modified nucleotide
  modified_base 20..21: mod_base = OTHER; note = 2'-O-methyl modified nucleotide
  source 1..21: mol_type = other RNA
taagataatatatacatgttt

SEQ ID NO: 585 - RNA, 21 nt, synthetic construct
  misc_feature 1..21: note = Synthetic
  modified_base 5..7: mod_base = OTHER; note = 2'-O-methyl modified nucleotide
  modified_base 9..10: mod_base = OTHER; note = 2'-O-methyl modified nucleotide
  modified_base 15..16: mod_base = OTHER; note = 2'-O-methyl modified nucleotide
  modified_base 19..21: mod_base = OTHER; note = 2'-O-methyl modified nucleotide
  modified_base 2..3: mod_base = OTHER; note = phosphorothioate linkage
  modified_base 20..21: mod_base = OTHER; note = phosphorothioate linkage
  source 1..21: mol_type = other RNA
aaggtttattgagttcaactt

SEQ ID NO: 586 - RNA, 21 nt, synthetic construct
  misc_feature 1..21: note = Synthetic
  modified_base 5..7: mod_base = OTHER; note = 2'-O-methyl modified nucleotide
  modified_base 9..10: mod_base = OTHER; note = 2'-O-methyl modified nucleotide
  modified_base 15..16: mod_base = OTHER; note = 2'-O-methyl modified nucleotide
  modified_base 19..21: mod_base = OTHER; note = 2'-O-methyl modified nucleotide
  modified_base 2..3: mod_base = OTHER; note = phosphorothioate linkage
  modified_base 3..4: mod_base = OTHER; note = phosphorothioate linkage
  modified_base 20..21: mod_base = OTHER; note = phosphorothioate linkage
  source 1..21: mol_type = other RNA
aaggtttattgagttcaactt

SEQ ID NO: 587 - RNA, 21 nt, synthetic construct
  misc_feature 1..21: note = Synthetic
  modified_base 7: mod_base = OTHER; note = 2'-O-methyl modified nucleotide
  modified_base 16: mod_base = OTHER; note = 2'-O-methyl modified nucleotide
  modified_base 20..21: mod_base = OTHER; note = 2'-O-methyl modified nucleotide
  modified_base 1..2: mod_base = OTHER; note = phosphorothioate linkage
  modified_base 2..3: mod_base = OTHER; note = phosphorothioate linkage
  modified_base 3..4: mod_base = OTHER; note = phosphorothioate linkage
  modified_base 20..21: mod_base = OTHER; note = phosphorothioate linkage
  source 1..21: mol_type = other RNA
aaggtttattgagttcaactt

SEQ ID NO: 588 - DNA, 21 bp, synthetic construct
  misc_feature 1..21: note = Synthetic
  misc_feature 1..19: note = ribonucleotide unmodified or modified as described for this sequence
  misc_feature 1: note = Nucleotide linked to an inverted abasic cap
  modified_base 2: mod_base = OTHER; note = 2'-deoxy-2'-fluoro modified nucleotide
  modified_base 6: mod_base = OTHER; note = 2'-deoxy-2'-fluoro modified nucleotide
  modified_base 12: mod_base = OTHER; note = 2'-deoxy-2'-fluoro modified nucleotide
  modified_base 14: mod_base = OTHER; note = 2'-deoxy-2'-fluoro modified nucleotide
  modified_base 16..19: mod_base = OTHER; note = 2'-deoxy-2'-fluoro modified nucleotide
  misc_feature 21: note = Nucleotide linked to an inverted abasic cap
  source 1..21: mol_type = other DNA
  misc_feature 1: note = DNA
  misc_feature 2: note = RNA
  misc_feature 3..5: note = DNA
  misc_feature 6: note = RNA
  misc_feature 7..11: note = DNA
  misc_feature 12: note = RNA
  misc_feature 13: note = DNA
  misc_feature 14: note = RNA
  misc_feature 15: note = DNA
  misc_feature 16..19: note = RNA
  misc_feature 20..21: note = DNA
gtaagtggaggtatacttctt

SEQ ID NO: 589 - RNA, 21 nt, synthetic construct
  misc_feature 1..21: note = Synthetic
  modified_base 4: mod_base = OTHER; note = 2'-O-methyl modified nucleotide
  modified_base 5: mod_base = OTHER; note = 2'-deoxy-2'-fluoro modified nucleotide
  modified_base 6: mod_base = OTHER; note = 2'-O-methyl modified nucleotide
  modified_base 7: mod_base = OTHER; note = 2'-deoxy-2'-fluoro modified nucleotide
  modified_base 8: mod_base = OTHER; note = 2'-O-methyl modified nucleotide
  modified_base 9..13: mod_base = OTHER; note = 2'-deoxy-2'-fluoro modified nucleotide
  modified_base 15..17: mod_base = OTHER; note = 2'-deoxy-2'-fluoro modified nucleotide
  modified_base 18: mod_base = OTHER; note = 2'-O-methyl modified nucleotide
  modified_base 19: mod_base = OTHER; note = 2'-deoxy-2'-fluoro modified nucleotide
  modified_base 20..21: mod_base = OTHER; note = 2'-O-methyl modified nucleotide
  source 1..21: mol_type = other RNA
gaagtatacctccacttactt

SEQ ID NO: 590 - RNA, 21 nt, synthetic construct
  misc_feature 1..21: note = Synthetic
  modified_base 5..7: mod_base = OTHER; note = 2'-O-methyl modified nucleotide
  modified_base 9..10: mod_base = OTHER; note = 2'-O-methyl modified nucleotide
  modified_base 15..16: mod_base = OTHER; note = 2'-O-methyl modified nucleotide
  modified_base 19..21: mod_base = OTHER; note = 2'-O-methyl modified nucleotide
  modified_base 1..2: mod_base = OTHER; note = phosphorothioate linkage
  modified_base 3..4: mod_base = OTHER; note = phosphorothioate linkage
  modified_base 20..21: mod_base = OTHER; note = phosphorothioate linkage
  source 1..21: mol_type = other RNA
aaggtttattgagttcaactt

SEQ ID NO: 591 - DNA, 21 bp, synthetic construct
  misc_feature 1..21: note = Synthetic
  misc_feature 1..19: note = ribonucleotide unmodified or modified as described for this sequence
  misc_feature 1: note = Nucleotide linked to an inverted abasic cap
  modified_base 2: mod_base = OTHER; note = 2'-deoxy-2'-fluoro modified nucleotide
  modified_base 9..10: mod_base = OTHER; note = 2'-deoxy-2'-fluoro modified nucleotide
  modified_base 14: mod_base = OTHER; note = 2'-deoxy-2'-fluoro modified nucleotide
  modified_base 17..18: mod_base = OTHER; note = 2'-deoxy-2'-fluoro modified nucleotide
  misc_feature 21: note = Nucleotide linked to an inverted abasic cap
  source 1..21: mol_type = other DNA
  misc_feature 1: note = DNA
  misc_feature 2: note = RNA
  misc_feature 3..8: note = DNA
  misc_feature 9..10: note = RNA
  misc_feature 11..13: note = DNA
  misc_feature 14: note = RNA
  misc_feature 15..16: note = DNA
  misc_feature 17..18: note = RNA
  misc_feature 19..21: note = DNA
acgggaagctgggcagctatt

SEQ ID NO: 592 - RNA, 21 nt, synthetic construct
  misc_feature 1..21: note = Synthetic
  modified_base 4..5: mod_base = OTHER; note = 2'-deoxy-2'-fluoro modified nucleotide
  modified_base 6: mod_base = OTHER; note = 2'-O-methyl modified nucleotide
  modified_base 7..9: mod_base = OTHER; note = 2'-deoxy-2'-fluoro modified nucleotide
  modified_base 10..11: mod_base = OTHER; note = 2'-O-methyl modified nucleotide
  modified_base 12..17: mod_base = OTHER; note = 2'-deoxy-2'-fluoro modified nucleotide
  modified_base 18: mod_base = OTHER; note = 2'-O-methyl modified nucleotide
  modified_base 19: mod_base = OTHER; note = 2'-deoxy-2'-fluoro modified nucleotide
  modified_base 20..21: mod_base = OTHER; note = 2'-O-methyl modified nucleotide
  source 1..21: mol_type = other RNA
tagctgcccagcttcccgttt

SEQ ID NO: 593 - DNA, 21 bp, synthetic construct
  misc_feature 1..21: note = Synthetic
  misc_feature 1..19: note = ribonucleotide unmodified or modified as described for this sequence
  misc_feature 1: note = Nucleotide linked to an inverted abasic cap
  modified_base 2: mod_base = OTHER; note = 2'-deoxy-2'-fluoro modified nucleotide
  modified_base 4: mod_base = OTHER; note = 2'-deoxy-2'-fluoro modified nucleotide
  modified_base 6: mod_base = OTHER; note = 2'-deoxy-2'-fluoro modified nucleotide
  modified_base 8..11: mod_base = OTHER; note = 2'-deoxy-2'-fluoro modified nucleotide
  modified_base 13: mod_base = OTHER; note = 2'-deoxy-2'-fluoro modified nucleotide
  modified_base 15: mod_base = OTHER; note = 2'-deoxy-2'-fluoro modified nucleotide
  modified_base 18: mod_base = OTHER; note = 2'-deoxy-2'-fluoro modified nucleotide
  misc_feature 21: note = Nucleotide linked to an inverted abasic cap
  source 1..21: mol_type = other DNA
  misc_feature 1: note = DNA
  misc_feature 2: note = RNA
  misc_feature 3: note = DNA
  misc_feature 4: note = RNA
  misc_feature 5: note = DNA
  misc_feature 6: note = RNA
  misc_feature 7: note = DNA
  misc_feature 8..11: note = RNA
  misc_feature 12: note = DNA
  misc_feature 13: note = RNA
  misc_feature 14: note = DNA
  misc_feature 15: note = RNA
  misc_feature 16..17: note = DNA
  misc_feature 18: note = RNA
  misc_feature 19..21: note = DNA
gtgcgcgccctgcacgacatt

SEQ ID NO: 594 - RNA, 21 nt, synthetic construct
  misc_feature 1..21: note = Synthetic
  modified_base 4: mod_base = OTHER; note = 2'-deoxy-2'-fluoro modified nucleotide
  modified_base 5: mod_base = OTHER; note = 2'-O-methyl modified nucleotide
  modified_base 6: mod_base = OTHER; note = 2'-deoxy-2'-fluoro modified nucleotide
  modified_base 7: mod_base = OTHER; note = 2'-O-methyl modified nucleotide
  modified_base 8: mod_base = OTHER; note = 2'-deoxy-2'-fluoro modified nucleotide
  modified_base 9..12: mod_base = OTHER; note = 2'-O-methyl modified nucleotide
  modified_base 13: mod_base = OTHER; note = 2'-deoxy-2'-fluoro modified nucleotide
  modified_base 15: mod_base = OTHER; note = 2'-deoxy-2'-fluoro modified nucleotide
  modified_base 16: mod_base = OTHER; note = 2'-O-methyl modified nucleotide
  modified_base 17: mod_base = OTHER; note = 2'-deoxy-2'-fluoro modified nucleotide
  modified_base 18: mod_base = OTHER; note = 2'-O-methyl modified nucleotide
  modified_base 19: mod_base = OTHER; note = 2'-deoxy-2'-fluoro modified nucleotide
  modified_base 20..21: mod_base = OTHER; note = 2'-O-methyl modified nucleotide
  source 1..21: mol_type = other RNA
tgtcgtgcagggcgcgcactt

SEQ ID NO: 595 - DNA, 21 bp, synthetic construct
  misc_feature 1..21: note = Synthetic
  misc_feature 1..19: note = ribonucleotide unmodified or modified as described for this sequence
  misc_feature 1: note = Nucleotide linked to an inverted abasic cap
  modified_base 1: mod_base = OTHER; note = 2'-deoxy-2'-fluoro modified nucleotide
  modified_base 4..6: mod_base = OTHER; note = 2'-deoxy-2'-fluoro modified nucleotide
  modified_base 9: mod_base = OTHER; note = 2'-deoxy-2'-fluoro modified nucleotide
  modified_base 13: mod_base = OTHER; note = 2'-deoxy-2'-fluoro modified nucleotide
  modified_base 17: mod_base = OTHER; note = 2'-deoxy-2'-fluoro modified nucleotide
  misc_feature 21: note = Nucleotide linked to an inverted abasic cap
  source 1..21: mol_type = other DNA
  misc_feature 1: note = RNA
  misc_feature 2..3: note = DNA
  misc_feature 4..6: note = RNA
  misc_feature 7..8: note = DNA
  misc_feature 9: note = RNA
  misc_feature 10..12: note = DNA
  misc_feature 13: note = RNA
  misc_feature 14..16: note = DNA
  misc_feature 17: note = RNA
  misc_feature 18..21: note = DNA
cggcccaacgggcagacgatt

SEQ ID NO: 596 - RNA, 21 nt, synthetic construct
  misc_feature 1..21: note = Synthetic
  modified_base 4..6: mod_base = OTHER; note = 2'-deoxy-2'-fluoro modified nucleotide
  modified_base 7: mod_base = OTHER; note = 2'-O-methyl modified nucleotide
  modified_base 8..10: mod_base = OTHER; note = 2'-deoxy-2'-fluoro modified nucleotide
  modified_base 11: mod_base = OTHER; note = 2'-O-methyl modified nucleotide
  modified_base 12..13: mod_base = OTHER; note = 2'-deoxy-2'-fluoro modified nucleotide
  modified_base 15..16: mod_base = OTHER; note = 2'-O-methyl modified nucleotide
  modified_base 17..18: mod_base = OTHER; note = 2'-deoxy-2'-fluoro modified nucleotide
  modified_base 19..21: mod_base = OTHER; note = 2'-O-methyl modified nucleotide
  source 1..21: mol_type = other RNA
tcgtctgcccgttgggccgtt

SEQ ID NO: 597 - DNA, 21 bp, synthetic construct
  misc_feature 1..21: note = Synthetic
  misc_feature 1..19: note = ribonucleotide unmodified or modified as described for this sequence
  misc_feature 1: note = Nucleotide linked to an inverted abasic cap
  modified_base 1: mod_base = OTHER; note = 2'-deoxy-2'-fluoro modified nucleotide
  modified_base 3..4: mod_base = OTHER; note = 2'-deoxy-2'-fluoro modified nucleotide
  modified_base 6: mod_base = OTHER; note = 2'-deoxy-2'-fluoro modified nucleotide
  modified_base 9..13: mod_base = OTHER; note = 2'-deoxy-2'-fluoro modified nucleotide
  modified_base 15: mod_base = OTHER; note = 2'-deoxy-2'-fluoro modified nucleotide
  misc_feature 21: note = Nucleotide linked to an inverted abasic cap
  source 1..21: mol_type = other DNA
  misc_feature 1: note = RNA
  misc_feature 2: note = DNA
  misc_feature 3..4: note = RNA
  misc_feature 5: note = DNA
  misc_feature 6: note = RNA
  misc_feature 7..8: note = DNA
  misc_feature 9..13: note = RNA
  misc_feature 14: note = DNA
  misc_feature 15: note = RNA
  misc_feature 16..21: note = DNA
cgtcgcaaccctcatgaagtt

SEQ ID NO: 598 - RNA, 21 nt, synthetic construct
  misc_feature 1..21: note = Synthetic
  modified_base 4: mod_base = OTHER; note = 2'-deoxy-2'-fluoro modified nucleotide
  modified_base 5: mod_base = OTHER; note = 2'-O-methyl modified nucleotide
  modified_base 6: mod_base = OTHER; note = 2'-deoxy-2'-fluoro modified nucleotide
  modified_base 7..11: mod_base = OTHER; note = 2'-O-methyl modified nucleotide
  modified_base 12..13: mod_base = OTHER; note = 2'-deoxy-2'-fluoro modified nucleotide
  modified_base 15: mod_base = OTHER; note = 2'-deoxy-2'-fluoro modified nucleotide
  modified_base 16..17: mod_base = OTHER; note = 2'-O-methyl modified nucleotide
  modified_base 18: mod_base = OTHER; note = 2'-deoxy-2'-fluoro modified nucleotide
  modified_base 19..21: mod_base = OTHER; note = 2'-O-methyl modified nucleotide
  source 1..21: mol_type = other RNA
cttcatgagggttgcgacgtt

SEQ ID NO: 599 - DNA, 21 bp, synthetic construct
  misc_feature 1..21: note = Synthetic
  misc_feature 1..19: note = ribonucleotide unmodified or modified as described for this sequence
  misc_feature 1: note = Nucleotide linked to an inverted abasic cap
  modified_base 2..6: mod_base = OTHER; note = 2'-deoxy-2'-fluoro modified nucleotide
  modified_base 10: mod_base = OTHER; note = 2'-deoxy-2'-fluoro modified nucleotide
  modified_base 12: mod_base = OTHER; note = 2'-deoxy-2'-fluoro modified nucleotide
  modified_base 15: mod_base = OTHER; note = 2'-deoxy-2'-fluoro modified nucleotide
  modified_base 17: mod_base = OTHER; note = 2'-deoxy-2'-fluoro modified nucleotide
  misc_feature 21: note = Nucleotide linked to an inverted abasic cap
  source 1..21: mol_type = other DNA
  misc_feature 1: note = DNA
  misc_feature 2..6: note = RNA
  misc_feature 7..9: note = DNA
  misc_feature 10: note = RNA
  misc_feature 11: note = DNA
  misc_feature 12: note = RNA
  misc_feature 13..14: note = DNA
  misc_feature 15: note = RNA
  misc_feature 16: note = DNA
  misc_feature 17: note = RNA
  misc_feature 18..21: note = DNA
gtctctgagtgtagtatgatt

SEQ ID NO: 600 - RNA, 21 nt, synthetic construct
  misc_feature 1..21: note = Synthetic
  modified_base 4: mod_base = OTHER; note = 2'-deoxy-2'-fluoro modified nucleotide
  modified_base 5: mod_base = OTHER; note = 2'-O-methyl modified nucleotide
  modified_base 6..7: mod_base = OTHER; note = 2'-deoxy-2'-fluoro modified nucleotide
  modified_base 8: mod_base = OTHER; note = 2'-O-methyl modified nucleotide
  modified_base 9: mod_base = OTHER; note = 2'-deoxy-2'-fluoro modified nucleotide
  modified_base 10: mod_base = OTHER; note = 2'-O-methyl modified nucleotide
  modified_base 11..13: mod_base = OTHER; note = 2'-deoxy-2'-fluoro modified nucleotide
  modified_base 15..18: mod_base = OTHER; note = 2'-O-methyl modified nucleotide
  modified_base 19: mod_base = OTHER; note = 2'-deoxy-2'-fluoro modified nucleotide
  modified_base 20..21: mod_base = OTHER; note = 2'-O-methyl modified nucleotide
  source 1..21: mol_type = other RNA
tcatactacactcagagactt

SEQ ID NO: 601 - DNA, 21 bp, synthetic construct
  misc_feature 1..21: note = Synthetic
  misc_feature 1..19: note = ribonucleotide unmodified or modified as described for this sequence
  misc_feature 1: note = Nucleotide linked to an inverted abasic cap
  modified_base 1: mod_base = OTHER; note = 2'-deoxy-2'-fluoro modified nucleotide
  modified_base 6: mod_base = OTHER; note = 2'-deoxy-2'-fluoro modified nucleotide
  modified_base 10: mod_base = OTHER; note = 2'-deoxy-2'-fluoro modified nucleotide
  modified_base 16: mod_base = OTHER; note = 2'-deoxy-2'-fluoro modified nucleotide
  modified_base 18: mod_base = OTHER; note = 2'-deoxy-2'-fluoro modified nucleotide
  misc_feature 21: note = Nucleotide linked to an inverted abasic cap
  source 1..21: mol_type = other DNA
  misc_feature 1: note = RNA
  misc_feature 2..5: note = DNA
  misc_feature 6: note = RNA
  misc_feature 7..9: note = DNA
  misc_feature 10: note = RNA
  misc_feature 11..15: note = DNA
  misc_feature 16: note = RNA
  misc_feature 17: note = DNA
  misc_feature 18: note = RNA
  misc_feature 19..21: note = DNA
caaggtaagtggaggtatatt

SEQ ID NO: 602 - RNA, 21 nt, synthetic construct
  misc_feature 1..21: note = Synthetic
  modified_base 4: mod_base = OTHER; note = 2'-O-methyl modified nucleotide
  modified_base 5..9: mod_base = OTHER; note = 2'-deoxy-2'-fluoro modified nucleotide
  modified_base 10: mod_base = OTHER; note = 2'-O-methyl modified nucleotide
  modified_base 11..13: mod_base = OTHER; note = 2'-deoxy-2'-fluoro modified nucleotide
  modified_base 15..18: mod_base = OTHER; note = 2'-deoxy-2'-fluoro modified nucleotide
  modified_base 19..21: mod_base = OTHER; note = 2'-O-methyl modified nucleotide
  source 1..21: mol_type = other RNA
tatacctccacttaccttgtt

SEQ ID NO: 603 - DNA, 21 bp, synthetic construct
  misc_feature 1..21: note = Synthetic
  misc_feature 1..19: note = ribonucleotide unmodified or modified as described for this sequence
  misc_feature 1: note = Nucleotide linked to an inverted abasic cap
  modified_base 1..6: mod_base = OTHER; note = 2'-deoxy-2'-fluoro modified nucleotide
  modified_base 11..15: mod_base = OTHER; note = 2'-deoxy-2'-fluoro modified nucleotide
  modified_base 18..19: mod_base = OTHER; note = 2'-deoxy-2'-fluoro modified nucleotide
  misc_feature 21: note = Nucleotide linked to an inverted abasic cap
  source 1..21: mol_type = other DNA
  misc_feature 1..6: note = RNA
  misc_feature 7..10: note = DNA
  misc_feature 11..15: note = RNA
  misc_feature 16..17: note = DNA
  misc_feature 18..19: note = RNA
  misc_feature 20..21: note = DNA
tcttctagagcctttgatctt

SEQ ID NO: 604 - RNA, 21 nt, synthetic construct
  misc_feature 1..21: note = Synthetic
  modified_base 4: mod_base = OTHER; note = 2'-deoxy-2'-fluoro modified nucleotide
  modified_base 5..9: mod_base = OTHER; note = 2'-O-methyl modified nucleotide
  modified_base 10..13: mod_base = OTHER; note = 2'-deoxy-2'-fluoro modified nucleotide
  modified_base 15..21: mod_base = OTHER; note = 2'-O-methyl modified nucleotide
  source 1..21: mol_type = other RNA
gatcaaaggctctagaagatt

SEQ ID NO: 605 - DNA, 21 bp, synthetic construct
  misc_feature 1..21: note = Synthetic
  misc_feature 1..19: note = ribonucleotide unmodified or modified as described for this sequence
  misc_feature 1: note = Nucleotide linked to an inverted abasic cap
  modified_base 1: mod_base = OTHER; note = 2'-deoxy-2'-fluoro modified nucleotide
  modified_base 3..6: mod_base = OTHER; note = 2'-deoxy-2'-fluoro modified nucleotide
  modified_base 8: mod_base = OTHER; note = 2'-deoxy-2'-fluoro modified nucleotide
  modified_base 10: mod_base = OTHER; note = 2'-deoxy-2'-fluoro modified nucleotide
  modified_base 13: mod_base = OTHER; note = 2'-deoxy-2'-fluoro modified nucleotide
  modified_base 15..16: mod_base = OTHER; note = 2'-deoxy-2'-fluoro modified nucleotide
  misc_feature 21: note = Nucleotide linked to an inverted abasic cap
  source 1..21: mol_type = other DNA
  misc_feature 1: note = RNA
  misc_feature 2: note = DNA
  misc_feature 3..6: note = RNA
  misc_feature 7: note = DNA
  misc_feature 8: note = RNA
  misc_feature 9: note = DNA
  misc_feature 10: note = RNA
  misc_feature 11..12: note = DNA
  misc_feature 13: note = RNA
  misc_feature 14: note = DNA
  misc_feature 15..16: note = RNA
  misc_feature 17..21: note = DNA
cgccctgcacgacaccgggtt

SEQ ID NO: 606 - RNA, 21 nt, synthetic construct
  misc_feature 1..21: note = Synthetic
  modified_base 4..5: mod_base = OTHER; note = 2'-O-methyl modified nucleotide
  modified_base 6: mod_base = OTHER; note = 2'-deoxy-2'-fluoro modified nucleotide
  modified_base 7: mod_base = OTHER; note = 2'-O-methyl modified nucleotide
  modified_base 8..9: mod_base = OTHER; note = 2'-deoxy-2'-fluoro modified nucleotide
  modified_base 10: mod_base = OTHER; note = 2'-O-methyl modified nucleotide
  modified_base 11: mod_base = OTHER; note = 2'-deoxy-2'-fluoro modified nucleotide
  modified_base 12: mod_base = OTHER; note = 2'-O-methyl modified nucleotide
  modified_base 13: mod_base = OTHER; note = 2'-deoxy-2'-fluoro modified nucleotide
  modified_base 15..17: mod_base = OTHER; note = 2'-O-methyl modified nucleotide
  modified_base 18: mod_base = OTHER; note = 2'-deoxy-2'-fluoro modified nucleotide
  modified_base 19..21: mod_base = OTHER; note = 2'-O-methyl modified nucleotide
  source 1..21: mol_type = other RNA
cccggtgtcgtgcagggcgtt

SEQ ID NO: 607 - DNA, 21 bp, synthetic construct
  misc_feature 1..21: note = Synthetic
  misc_feature 1..19: note = ribonucleotide unmodified or modified as described for this sequence
  misc_feature 1: note = Nucleotide linked to an inverted abasic cap
  modified_base 1: mod_base = OTHER; note = 2'-deoxy-2'-fluoro modified nucleotide
  modified_base 3: mod_base = OTHER; note = 2'-deoxy-2'-fluoro modified nucleotide
  modified_base 5: mod_base = OTHER; note = 2'-deoxy-2'-fluoro modified nucleotide
  modified_base 7: mod_base = OTHER; note = 2'-deoxy-2'-fluoro modified nucleotide
  modified_base 11: mod_base = OTHER; note = 2'-deoxy-2'-fluoro modified nucleotide
  modified_base 15: mod_base = OTHER; note = 2'-deoxy-2'-fluoro modified nucleotide
  modified_base 17: mod_base = OTHER; note = 2'-deoxy-2'-fluoro modified nucleotide
  misc_feature 21: note = Nucleotide linked to an inverted abasic cap
  source 1..21: mol_type = other DNA
  misc_feature 1: note = RNA
  misc_feature 2: note = DNA
  misc_feature 3: note = RNA
  misc_feature 4: note = DNA
  misc_feature 5: note = RNA
  misc_feature 6: note = DNA
  misc_feature 7: note = RNA
  misc_feature 8..10: note = DNA
  misc_feature 11: note = RNA
  misc_feature 12..14: note = DNA
  misc_feature 15: note = RNA
  misc_feature 16: note = DNA
  misc_feature 17: note = RNA
  misc_feature 18..21: note = DNA
cgtgcatgaacaagcacggtt

SEQ ID NO: 608 - RNA, 21 nt, synthetic construct
  misc_feature 1..21: note = Synthetic
  modified_base 4: mod_base = OTHER; note = 2'-deoxy-2'-fluoro modified nucleotide
  modified_base 5: mod_base = OTHER; note = 2'-O-methyl modified nucleotide
  modified_base 6..8: mod_base = OTHER; note = 2'-deoxy-2'-fluoro modified nucleotide
  modified_base 9: mod_base = OTHER; note = 2'-O-methyl modified nucleotide
  modified_base 10..12: mod_base = OTHER; note = 2'-deoxy-2'-fluoro modified nucleotide
  modified_base 13: mod_base = OTHER; note = 2'-O-methyl modified nucleotide
  modified_base 14: mod_base = OTHER; note = 2'-deoxy-2'-fluoro modified nucleotide
  modified_base 15: mod_base = OTHER; note = 2'-O-methyl modified nucleotide
  modified_base 16: mod_base = OTHER; note = 2'-deoxy-2'-fluoro modified nucleotide
  modified_base 17: mod_base = OTHER; note = 2'-O-methyl modified nucleotide
  modified_base 18: mod_base = OTHER; note = 2'-deoxy-2'-fluoro modified nucleotide
  modified_base 19..21: mod_base = OTHER; note = 2'-O-methyl modified nucleotide
  source 1..21: mol_type = other RNA
ccgtgcttgttcatgcacgtt

SEQ ID NO: 609 - DNA, 21 bp, synthetic construct
  misc_feature 1..21: note = Synthetic
  misc_feature 1..19: note = ribonucleotide unmodified or modified as described for this sequence
  misc_feature 1: note = Nucleotide linked to an inverted abasic cap
  modified_base 1: mod_base = OTHER; note = 2'-deoxy-2'-fluoro modified nucleotide
  modified_base 3..5: mod_base = OTHER; note = 2'-deoxy-2'-fluoro modified nucleotide
  modified_base 7: mod_base = OTHER; note = 2'-deoxy-2'-fluoro modified nucleotide
  modified_base 9: mod_base = OTHER; note = 2'-deoxy-2'-fluoro modified nucleotide
  modified_base 12: mod_base = OTHER; note = 2'-deoxy-2'-fluoro modified nucleotide
  modified_base 14: mod_base = OTHER; note = 2'-deoxy-2'-fluoro modified nucleotide
  modified_base 18..19: mod_base = OTHER; note = 2'-deoxy-2'-fluoro modified nucleotide
  misc_feature 21: note = Nucleotide linked to an inverted abasic cap
  source 1..21: mol_type = other DNA
  misc_feature 1: note = RNA
  misc_feature 2: note = DNA
  misc_feature 3..5: note = RNA
  misc_feature 6: note = DNA
  misc_feature 7: note = RNA
  misc_feature 8: note = DNA
  misc_feature 9: note = RNA
  misc_feature 10..11: note = DNA
  misc_feature 12: note = RNA
  misc_feature 13: note = DNA
  misc_feature 14: note = RNA
  misc_feature 15..17: note = DNA
  misc_feature 18..19: note = RNA
  misc_feature 20..21: note = DNA
catccgcgcagcacagatttt

SEQ ID NO: 610 - RNA, 21 nt, synthetic construct
  misc_feature 1..21: note = Synthetic
  modified_base 4..5: mod_base = OTHER; note = 2'-deoxy-2'-fluoro modified nucleotide
  modified_base 6: mod_base = OTHER; note = 2'-O-methyl modified nucleotide
  modified_base 7: mod_base = OTHER; note = 2'-deoxy-2'-fluoro modified nucleotide
  modified_base 8: mod_base = OTHER; note = 2'-O-methyl modified nucleotide
  modified_base 9..10: mod_base = OTHER; note = 2'-deoxy-2'-fluoro modified nucleotide
  modified_base 11: mod_base = OTHER; note = 2'-O-methyl modified nucleotide
  modified_base 12: mod_base = OTHER; note = 2'-deoxy-2'-fluoro modified nucleotide
  modified_base 13: mod_base = OTHER; note = 2'-O-methyl modified nucleotide
  modified_base 14: mod_base = OTHER; note = 2'-deoxy-2'-fluoro modified nucleotide
  modified_base 15..17: mod_base = OTHER; note = 2'-O-methyl modified nucleotide
  modified_base 18: mod_base = OTHER; note = 2'-deoxy-2'-fluoro modified nucleotide
  modified_base 19..21: mod_base = OTHER; note = 2'-O-methyl modified nucleotide
  source 1..21: mol_type = other RNA
aatctgtgctgcgcggatgtt

SEQ ID NO: 611 - DNA, 21 bp, synthetic construct
  misc_feature 1..21: note = Synthetic
  misc_feature 1..19: note = ribonucleotide unmodified or modified as described for this sequence
  misc_feature 1: note = Nucleotide linked to an inverted abasic cap
  modified_base 3..4: mod_base = OTHER; note = 2'-deoxy-2'-fluoro modified nucleotide
  modified_base 6..8: mod_base = OTHER; note = 2'-deoxy-2'-fluoro modified nucleotide
  modified_base 10: mod_base = OTHER; note = 2'-deoxy-2'-fluoro modified nucleotide
  modified_base 14: mod_base = OTHER; note = 2'-deoxy-2'-fluoro modified nucleotide
  modified_base 17: mod_base = OTHER; note = 2'-deoxy-2'-fluoro modified nucleotide
  modified_base 19: mod_base = OTHER; note = 2'-deoxy-2'-fluoro modified nucleotide
  misc_feature 21: note = Nucleotide linked to an inverted abasic cap
  source 1..21: mol_type = other DNA
  misc_feature 1..2: note = DNA
  misc_feature 3..4: note = RNA
  misc_feature 5: note = DNA
  misc_feature 6..8: note = RNA
  misc_feature 9: note = DNA
  misc_feature 10: note = RNA
  misc_feature 11..13: note = DNA
  misc_feature 14: note = RNA
  misc_feature 15..16: note = DNA
  misc_feature 17: note = RNA
  misc_feature 18: note = DNA
  misc_feature 19: note = RNA
  misc_feature 20..21: note = DNA
ggctgctcatgagcagcattt

SEQ ID NO: 612 - RNA, 21 nt, synthetic construct
  misc_feature 1..21: note = Synthetic
  modified_base 4..5: mod_base = OTHER; note = 2'-deoxy-2'-fluoro modified nucleotide
  modified_base 6: mod_base = OTHER; note = 2'-O-methyl modified nucleotide
  modified_base 7..9: mod_base = OTHER; note = 2'-deoxy-2'-fluoro modified nucleotide
  modified_base 10: mod_base = OTHER; note = 2'-O-methyl modified nucleotide
  modified_base 11: mod_base = OTHER; note = 2'-deoxy-2'-fluoro modified nucleotide
  modified_base 12..13: mod_base = OTHER; note = 2'-O-methyl modified nucleotide
  modified_base 15: mod_base = OTHER; note = 2'-deoxy-2'-fluoro modified nucleotide
  modified_base 16..17: mod_base = OTHER; note = 2'-O-methyl modified nucleotide
  modified_base 18..19: mod_base = OTHER; note = 2'-deoxy-2'-fluoro modified nucleotide
  modified_base 20..21: mod_base = OTHER; note = 2'-O-methyl modified nucleotide
  source 1..21: mol_type = other RNA
atgctgctcatgagcagcctt

SEQ ID NO: 613 - DNA, 21 bp, synthetic construct
  misc_feature 1..21: note = Synthetic
  misc_feature 1..19: note = ribonucleotide unmodified or modified as described for this sequence
  misc_feature 1: note = Nucleotide linked to an inverted abasic cap
  modified_base 1..4: mod_base = OTHER; note = 2'-deoxy-2'-fluoro modified nucleotide
  modified_base 6: mod_base = OTHER; note = 2'-deoxy-2'-fluoro modified nucleotide
  modified_base 8: mod_base = OTHER; note = 2'-deoxy-2'-fluoro modified nucleotide
  modified_base 11: mod_base = OTHER; note = 2'-deoxy-2'-fluoro modified nucleotide
  modified_base 13..14: mod_base = OTHER; note = 2'-deoxy-2'-fluoro modified nucleotide
  misc_feature 21: note = Nucleotide linked to an inverted abasic cap
  source 1..21: mol_type = other DNA
  misc_feature 1..4: note = RNA
  misc_feature 5: note = DNA
  misc_feature 6: note = RNA
  misc_feature 7: note = DNA
  misc_feature 8: note = RNA
  misc_feature 9..10: note = DNA
  misc_feature 11: note = RNA
  misc_feature 12: note = DNA
  misc_feature 13..14: note = RNA
  misc_feature 15..21: note = DNA
ccctgcacgacaccgggaatt

SEQ ID NO: 614 - RNA, 21 nt, synthetic construct
  misc_feature 1..21: note = Synthetic
  modified_base 4..5: mod_base = OTHER; note = 2'-deoxy-2'-fluoro modified nucleotide
  modified_base 6..7: mod_base = OTHER; note = 2'-O-methyl modified nucleotide
  modified_base 8: mod_base = OTHER; note = 2'-deoxy-2'-fluoro modified nucleotide
  modified_base 9: mod_base = OTHER; note = 2'-O-methyl modified nucleotide
  modified_base 10..11: mod_base = OTHER; note = 2'-deoxy-2'-fluoro modified nucleotide
  modified_base 12: mod_base = OTHER; note = 2'-O-methyl modified nucleotide
  modified_base 13: mod_base = OTHER; note = 2'-deoxy-2'-fluoro modified nucleotide
  modified_base 15: mod_base = OTHER; note = 2'-deoxy-2'-fluoro modified nucleotide
  modified_base 16..21: mod_base = OTHER; note = 2'-O-methyl modified nucleotide
  source 1..21: mol_type = other RNA
ttcccggtgtcgtgcagggtt

SEQ ID NO: 615 - DNA, 21 bp, synthetic construct
  misc_feature 1..21: note = Synthetic
  misc_feature 1..19: note = ribonucleotide unmodified or modified as described for this sequence
  misc_feature 1: note = Nucleotide linked to an inverted abasic cap
  modified_base 3: mod_base = OTHER; note = 2'-deoxy-2'-fluoro modified nucleotide
  modified_base 6..7: mod_base = OTHER; note = 2'-deoxy-2'-fluoro modified nucleotide
  modified_base 10..11: mod_base = OTHER; note = 2'-deoxy-2'-fluoro modified nucleotide
  modified_base 14..15: mod_base = OTHER; note = 2'-deoxy-2'-fluoro modified nucleotide
  misc_feature 21: note = Nucleotide linked to an inverted abasic cap
  source 1..21: mol_type = other DNA
  misc_feature 1..2: note = DNA
  misc_feature 3: note = RNA
  misc_feature 4..5: note = DNA
  misc_feature 6..7: note = RNA
  misc_feature 8..9: note = DNA
  misc_feature 10..11: note = RNA
  misc_feature 12..13: note = DNA
  misc_feature 14..15: note = RNA
  misc_feature 16..21: note = DNA
ggcagctggtcagccagaatt

SEQ ID NO: 616 - RNA, 21 nt, synthetic construct
  misc_feature 1..21: note = Synthetic
  modified_base 4: mod_base = OTHER; note = 2'-deoxy-2'-fluoro modified nucleotide
  modified_base 5..6: mod_base = OTHER; note = 2'-O-methyl modified nucleotide
  modified_base 7..8: mod_base = OTHER; note = 2'-deoxy-2'-fluoro modified nucleotide
  modified_base 9..10: mod_base = OTHER; note = 2'-O-methyl modified nucleotide
  modified_base 11..12: mod_base = OTHER; note = 2'-deoxy-2'-fluoro modified nucleotide
  modified_base 13: mod_base = OTHER; note = 2'-O-methyl modified nucleotide
  modified_base 15..16: mod_base = OTHER; note = 2'-deoxy-2'-fluoro modified nucleotide
  modified_base 17: mod_base = OTHER; note = 2'-O-methyl modified nucleotide
  modified_base 18..19: mod_base = OTHER; note = 2'-deoxy-2'-fluoro modified nucleotide
  modified_base 20..21: mod_base = OTHER; note = 2'-O-methyl modified nucleotide
  source 1..21: mol_type = other RNA
ttctggctgaccagctgcctt

SEQ ID NO: 617 - DNA, 21 bp, synthetic construct
  misc_feature 1..21: note = Synthetic
  misc_feature 1..19: note = ribonucleotide unmodified or modified as described for this sequence
  misc_feature 1: note = Nucleotide linked to an inverted abasic cap
  modified_base 3..4: mod_base = OTHER; note = 2'-deoxy-2'-fluoro modified nucleotide
  modified_base 6: mod_base = OTHER; note = 2'-deoxy-2'-fluoro modified nucleotide
  modified_base 8: mod_base = OTHER; note = 2'-deoxy-2'-fluoro modified nucleotide
  modified_base 10: mod_base = OTHER; note = 2'-deoxy-2'-fluoro modified nucleotide
  modified_base 12..13: mod_base = OTHER; note = 2'-deoxy-2'-fluoro modified nucleotide
  modified_base 15: mod_base = OTHER; note = 2'-deoxy-2'-fluoro modified nucleotide
  modified_base 17..18: mod_base = OTHER; note = 2'-deoxy-2'-fluoro modified nucleotide
  misc_feature 21: note = Nucleotide linked to an inverted abasic cap
  source 1..21: mol_type = other DNA
  misc_feature 1..2: note = DNA
  misc_feature 3..4: note = RNA
  misc_feature 5: note = DNA
  misc_feature 6: note = RNA
  misc_feature 7: note = DNA
  misc_feature 8: note = RNA
  misc_feature 9: note = DNA
  misc_feature 10: note = RNA
  misc_feature 11: note = DNA
  misc_feature 12..13: note = RNA
  misc_feature 14: note = DNA
  misc_feature 15: note = RNA
  misc_feature 16: note = DNA
  misc_feature 17..18: note = RNA
  misc_feature 19..21: note = DNA
ggttatgtacgtcatgttgtt

SEQ ID NO: 618 - RNA, 21 nt, synthetic construct
  misc_feature 1..21: note = Synthetic
  modified_base 4: mod_base = OTHER; note = 2'-deoxy-2'-fluoro modified nucleotide
  modified_base 5: mod_base = OTHER; note = 2'-O-methyl modified nucleotide
  modified_base 6: mod_base = OTHER; note = 2'-deoxy-2'-fluoro modified nucleotide
  modified_base 7..8: mod_base = OTHER; note = 2'-O-methyl modified nucleotide
  modified_base 9: mod_base = OTHER; note = 2'-deoxy-2'-fluoro modified nucleotide
  modified_base 10: mod_base = OTHER; note = 2'-O-methyl modified nucleotide
  modified_base 11: mod_base = OTHER; note = 2'-deoxy-2'-fluoro modified nucleotide
  modified_base 12: mod_base = OTHER; note = 2'-O-methyl modified nucleotide
  modified_base 13: mod_base = OTHER; note = 2'-deoxy-2'-fluoro modified nucleotide
  modified_base 15: mod_base = OTHER; note = 2'-deoxy-2'-fluoro modified nucleotide
  modified_base 16..17: mod_base = OTHER; note = 2'-O-methyl modified nucleotide
  modified_base 18..19: mod_base = OTHER; note = 2'-deoxy-2'-fluoro modified nucleotide
  modified_base 20..21: mod_base = OTHER; note = 2'-O-methyl modified nucleotide
  source 1..21: mol_type = other RNA
caacatgacgtacataacctt

SEQ ID NO: 619 - DNA, 21 bp, synthetic construct
  misc_feature 1..21: note = Synthetic
  misc_feature 1..19: note = ribonucleotide unmodified or modified as described for this sequence
  misc_feature 1: note = Nucleotide linked to an inverted abasic cap
  modified_base 3..5: mod_base = OTHER; note = 2'-deoxy-2'-fluoro modified nucleotide
  modified_base 8: mod_base = OTHER; note = 2'-deoxy-2'-fluoro modified nucleotide
  modified_base 12: mod_base = OTHER; note = 2'-deoxy-2'-fluoro modified nucleotide
  modified_base 16: mod_base = OTHER; note = 2'-deoxy-2'-fluoro modified nucleotide
  misc_feature 21: note = Nucleotide linked to an inverted abasic cap
  source 1..21: mol_type = other DNA
  misc_feature 1..2: note = DNA
  misc_feature 3..5: note = RNA
  misc_feature 6..7: note = DNA
  misc_feature 8: note = RNA
  misc_feature 9..11: note = DNA
  misc_feature 12: note = RNA
  misc_feature 13..15: note = DNA
  misc_feature 16: note = RNA
  misc_feature 17..21: note = DNA
ggcccaacgggcagacgaatt

SEQ ID NO: 620 - RNA, 21 nt, synthetic construct
  misc_feature 1..21: note = Synthetic
  modified_base 4: mod_base = OTHER; note = 2'-O-methyl modified nucleotide
  modified_base 5..7: mod_base = OTHER; note = 2'-deoxy-2'-fluoro modified nucleotide
  modified_base 8: mod_base = OTHER; note = 2'-O-methyl modified nucleotide
  modified_base 9..11: mod_base = OTHER; note = 2'-deoxy-2'-fluoro modified nucleotide
  modified_base 12: mod_base = OTHER; note = 2'-O-methyl modified nucleotide
  modified_base 13..14: mod_base = OTHER; note = 2'-deoxy-2'-fluoro modified nucleotide
  modified_base 15..17: mod_base = OTHER; note = 2'-O-methyl modified nucleotide
  modified_base 18..19: mod_base = OTHER; note = 2'-deoxy-2'-fluoro modified nucleotide
  modified_base 20..21: mod_base = OTHER; note = 2'-O-methyl modified nucleotide
  source 1..21: mol_type = other RNA
ttcgtctgcccgttgggcctt

SEQ ID NO: 621 - DNA, 21 bp, synthetic construct
  misc_feature 1..21: note = Synthetic
  misc_feature 1..19: note = ribonucleotide unmodified or modified as described for this sequence
  misc_feature 1: note = Nucleotide linked to an inverted abasic cap
  modified_base 7..8: mod_base = OTHER; note = 2'-deoxy-2'-fluoro modified nucleotide
  modified_base 12: mod_base = OTHER; note = 2'-deoxy-2'-fluoro modified nucleotide
  modified_base 15..16: mod_base = OTHER; note = 2'-deoxy-2'-fluoro modified nucleotide
  modified_base 18: mod_base = OTHER; note = 2'-deoxy-2'-fluoro modified nucleotide
  misc_feature 21: note = Nucleotide linked to an inverted abasic cap
  source 1..21: mol_type = other DNA
  misc_feature 1..6: note = DNA
  misc_feature 7..8: note = RNA
  misc_feature 9..11: note = DNA
  misc_feature 12: note = RNA
  misc_feature 13..14: note = DNA
  misc_feature 15..16: note = RNA
  misc_feature 17: note = DNA
  misc_feature 18: note = RNA
  misc_feature 19..21: note = DNA
gggaagctgggcagctacatt

SEQ ID NO: 622 - RNA, 21 nt, synthetic construct
  misc_feature 1..21: note = Synthetic
  modified_base 4..5: mod_base = OTHER; note = 2'-O-methyl modified nucleotide
  modified_base 6..7: mod_base = OTHER; note = 2'-deoxy-2'-fluoro modified nucleotide
  modified_base 8: mod_base = OTHER; note = 2'-O-methyl modified nucleotide
  modified_base 9..11: mod_base = OTHER; note = 2'-deoxy-2'-fluoro modified nucleotide
  modified_base 12..13: mod_base = OTHER; note = 2'-O-methyl modified nucleotide
  modified_base 14..19: mod_base = OTHER; note = 2'-deoxy-2'-fluoro modified nucleotide
  modified_base 20..21: mod_base = OTHER; note = 2'-O-methyl modified nucleotide
  source 1..21: mol_type = other RNA
tgtagctgcccagcttccctt

SEQ ID NO: 623 - DNA, 21 bp, synthetic construct
  misc_feature 1..21: note = Synthetic
  misc_feature 1..19: note = ribonucleotide unmodified or modified as described for this sequence
  misc_feature 1: note = Nucleotide linked to an inverted abasic cap
  modified_base 6..7: mod_base = OTHER; note = 2'-deoxy-2'-fluoro modified nucleotide
  modified_base 11: mod_base = OTHER; note = 2'-deoxy-2'-fluoro modified nucleotide
  modified_base 14..15: mod_base = OTHER; note = 2'-deoxy-2'-fluoro modified nucleotide
  modified_base 17: mod_base = OTHER; note = 2'-deoxy-2'-fluoro modified nucleotide
  misc_feature 21: note = Nucleotide linked to an inverted abasic cap
  source 1..21: mol_type = other DNA
  misc_feature 1..5: note = DNA
  misc_feature 6..7: note = RNA
  misc_feature 8..10: note = DNA
  misc_feature 11: note = RNA
  misc_feature 12..13: note = DNA
  misc_feature 14..15: note = RNA
  misc_feature 16: note = DNA
  misc_feature 17: note = RNA
  misc_feature 18..21: note = DNA
ggaagctgggcagctacaatt

SEQ ID NO: 624 - RNA, 21 nt, synthetic construct
  misc_feature 1..21: note = Synthetic
  modified_base 4: mod_base = OTHER; note = 2'-deoxy-2'-fluoro modified nucleotide
  modified_base 5..6: mod_base = OTHER; note = 2'-O-methyl modified nucleotide
  modified_base 7..8: mod_base = OTHER; note = 2'-deoxy-2'-fluoro modified nucleotide
  modified_base 9: mod_base = OTHER; note = 2'-O-methyl modified nucleotide
  modified_base 10..12: mod_base = OTHER; note = 2'-deoxy-2'-fluoro modified nucleotide
  modified_base 13: mod_base = OTHER; note = 2'-O-methyl modified nucleotide
  modified_base 15..19: mod_base = OTHER; note = 2'-deoxy-2'-fluoro modified nucleotide
  modified_base 20..21: mod_base = OTHER; note = 2'-O-methyl modified nucleotide
  source 1..21: mol_type = other RNA
ttgtagctgcccagcttcctt

SEQ ID NO: 625 - DNA, 21 bp, synthetic construct
  misc_feature 1..21: note = Synthetic
  misc_feature 1..19: note = ribonucleotide unmodified or modified as described for this sequence
  misc_feature 1: note = Nucleotide linked to an inverted abasic cap
  modified_base 2: mod_base = OTHER; note = 2'-deoxy-2'-fluoro modified nucleotide
  modified_base 4..5: mod_base = OTHER; note = 2'-deoxy-2'-fluoro modified nucleotide
  modified_base 9..12: mod_base = OTHER; note = 2'-deoxy-2'-fluoro modified nucleotide
  modified_base 14..16: mod_base = OTHER; note = 2'-deoxy-2'-fluoro modified nucleotide
  modified_base 18: mod_base = OTHER; note = 2'-deoxy-2'-fluoro modified nucleotide
  misc_feature 21: note = Nucleotide linked to an inverted abasic cap
  source 1..21: mol_type = other DNA
  misc_feature 1: note = DNA
  misc_feature 2: note = RNA
  misc_feature 3: note = DNA
  misc_feature 4..5: note = RNA
  misc_feature 6..8: note = DNA
  misc_feature 9..12: note = RNA
  misc_feature 13: note = DNA
  misc_feature 14..16: note = RNA
  misc_feature 17: note = DNA
  misc_feature 18: note = RNA
  misc_feature 19..21: note = DNA
gtattagactctacttgtatt

SEQ ID NO: 626 - RNA, 21 nt, synthetic construct
  misc_feature 1..21: note = Synthetic
  modified_base 4..6: mod_base = OTHER; note = 2'-O-methyl modified nucleotide
  modified_base 7: mod_base = OTHER; note = 2'-deoxy-2'-fluoro modified nucleotide
  modified_base 8..11: mod_base = OTHER; note = 2'-O-methyl modified nucleotide
  modified_base 12..14: mod_base = OTHER; note = 2'-deoxy-2'-fluoro modified nucleotide
  modified_base 15..16: mod_base = OTHER; note = 2'-O-methyl modified nucleotide
  modified_base 17: mod_base = OTHER; note = 2'-deoxy-2'-fluoro modified nucleotide
  modified_base 18: mod_base = OTHER; note = 2'-O-methyl modified nucleotide
  modified_base 19: mod_base = OTHER; note = 2'-deoxy-2'-fluoro modified nucleotide
  modified_base 20..21: mod_base = OTHER; note = 2'-O-methyl modified nucleotide
  source 1..21: mol_type = other RNA
tacaagtagagtctaatactt

SEQ ID NO: 627 - DNA, 21 bp, synthetic construct
  misc_feature 1..21: note = Synthetic
  misc_feature 1..19: note = ribonucleotide unmodified or modified as described for this sequence
  misc_feature 1: note = Nucleotide linked to an inverted abasic cap
  modified_base 4..5: mod_base = OTHER; note = 2'-deoxy-2'-fluoro modified nucleotide
  modified_base 7..8: mod_base = OTHER; note = 2'-deoxy-2'-fluoro modified nucleotide
  modified_base 12..13: mod_base = OTHER; note = 2'-deoxy-2'-fluoro modified nucleotide
  modified_base 15..17: mod_base = OTHER; note = 2'-deoxy-2'-fluoro modified nucleotide
  modified_base 19: mod_base = OTHER; note = 2'-deoxy-2'-fluoro modified nucleotide
  misc_feature 21: note = Nucleotide linked to an inverted abasic cap
  source 1..21: mol_type = other DNA
  misc_feature 1..3: note = DNA
  misc_feature 4..5: note = RNA
  misc_feature 6: note = DNA
  misc_feature 7..8: note = RNA
  misc_feature 9..11: note = DNA
  misc_feature 12..13: note = RNA
  misc_feature 14: note = DNA
  misc_feature 15..17: note = RNA
  misc_feature 18: note = DNA
  misc_feature 19: note = RNA
  misc_feature 20..21: note = DNA
aaaccattgggctgctcattt

SEQ ID NO: 628 - RNA, 21 nt, synthetic construct
  misc_feature 1..21: note = Synthetic
  modified_base 4..5: mod_base = OTHER; note = 2'-O-methyl modified nucleotide
  modified_base 6: mod_base = OTHER; note = 2'-deoxy-2'-fluoro modified nucleotide
  modified_base 7..8: mod_base = OTHER; note = 2'-O-methyl modified nucleotide
  modified_base 9..11: mod_base = OTHER; note = 2'-deoxy-2'-fluoro modified nucleotide
  modified_base 12..13: mod_base = OTHER; note = 2'-O-methyl modified nucleotide
  modified_base 14: mod_base = OTHER; note = 2'-deoxy-2'-fluoro modified nucleotide
  modified_base 15..16: mod_base = OTHER; note = 2'-O-methyl modified nucleotide
  modified_base 17..19: mod_base = OTHER; note = 2'-deoxy-2'-fluoro modified nucleotide
  modified_base 20..21: mod_base = OTHER; note = 2'-O-methyl modified nucleotide
  source 1..21: mol_type = other RNA
atgagcagcccaatggttttt

SEQ ID NO: 629 - DNA, 21 bp, synthetic construct
  misc_feature 1..21: note = Synthetic
  misc_feature 1..19: note = ribonucleotide unmodified or modified as described for this sequence
  misc_feature 1: note = Nucleotide linked to an inverted abasic cap
  modified_base 4..5: mod_base = OTHER; note = 2'-deoxy-2'-fluoro modified nucleotide
  modified_base 7..9: mod_base = OTHER; note = 2'-deoxy-2'-fluoro modified nucleotide
  modified_base 11: mod_base = OTHER; note = 2'-deoxy-2'-fluoro modified nucleotide
  modified_base 15: mod_base = OTHER; note = 2'-deoxy-2'-fluoro modified nucleotide
  modified_base 18: mod_base = OTHER; note = 2'-deoxy-2'-fluoro modified nucleotide
  misc_feature 21: note = Nucleotide linked to an inverted abasic cap
  source 1..21: mol_type = other DNA
  misc_feature 1..3: note = DNA
  misc_feature 4..5: note = RNA
  misc_feature 6: note = DNA
  misc_feature 7..9: note = RNA
  misc_feature 10: note = DNA
  misc_feature 11: note = RNA
  misc_feature 12..14: note = DNA
  misc_feature 15: note = RNA
  misc_feature 16..17: note = DNA
  misc_feature 18: note = RNA
  misc_feature 19..21: note = DNA
gggctgctcatgagcagcatt

SEQ ID NO: 630 - RNA, 21 nt, synthetic construct
  misc_feature 1..21: note = Synthetic
  modified_base 4: mod_base = OTHER; note = 2'-deoxy-2'-fluoro modified nucleotide
  modified_base 5: mod_base = OTHER; note = 2'-O-methyl modified nucleotide
  modified_base 6..8: mod_base = OTHER; note = 2'-deoxy-2'-fluoro modified nucleotide
  modified_base 9: mod_base = OTHER; note = 2'-O-methyl modified nucleotide
  modified_base 10: mod_base = OTHER; note = 2'-deoxy-2'-fluoro modified nucleotide
  modified_base 11..13: mod_base = OTHER; note = 2'-O-methyl modified nucleotide
  modified_base 14: mod_base = OTHER; note = 2'-deoxy-2'-fluoro modified nucleotide
  modified_base 15..16: mod_base = OTHER; note = 2'-O-methyl modified nucleotide
  modified_base 17..19: mod_base = OTHER; note = 2'-deoxy-2'-fluoro modified nucleotide
  modified_base 20..21: mod_base = OTHER; note = 2'-O-methyl modified nucleotide
  source 1..21: mol_type = other RNA
tgctgctcatgagcagccctt

SEQ ID NO: 631 - DNA, 21 bp, synthetic construct
  misc_feature 1..21: note = Synthetic
  misc_feature 1..19: note = ribonucleotide unmodified or modified as described for this sequence
  misc_feature 1: note = Nucleotide linked to an inverted abasic cap
  modified_base 2: mod_base = OTHER; note = 2'-deoxy-2'-fluoro modified nucleotide
  modified_base 4: mod_base = OTHER; note = 2'-deoxy-2'-fluoro modified nucleotide
  modified_base 11..12: mod_base = OTHER; note = 2'-deoxy-2'-fluoro modified nucleotide
  modified_base 16..17: mod_base = OTHER; note = 2'-deoxy-2'-fluoro modified nucleotide
  misc_feature 21: note = Nucleotide linked to an inverted abasic cap
  source 1..21: mol_type = other DNA
  misc_feature 1: note = DNA
  misc_feature 2: note = RNA
  misc_feature 3: note = DNA
  misc_feature 4: note = RNA
  misc_feature 5..10: note = DNA
  misc_feature 11..12: note = RNA
  misc_feature 13..15: note = DNA
  misc_feature 16..17: note = RNA
  misc_feature 18..21: note = DNA
gcgcaagagattggattaatt

SEQ ID NO: 632 - RNA, 21 nt, synthetic construct
  misc_feature 1..21: note = Synthetic
  modified_base 4: mod_base = OTHER; note = 2'-O-methyl modified nucleotide
  modified_base 5..7: mod_base = OTHER; note = 2'-deoxy-2'-fluoro modified nucleotide
  modified_base 8..9: mod_base = OTHER; note = 2'-O-methyl modified nucleotide
  modified_base 10..15: mod_base = OTHER; note = 2'-deoxy-2'-fluoro modified nucleotide
  modified_base 16: mod_base = OTHER; note = 2'-O-methyl modified nucleotide
  modified_base 17: mod_base = OTHER; note = 2'-deoxy-2'-fluoro modified nucleotide
  modified_base 18: mod_base = OTHER; note = 2'-O-methyl modified nucleotide
  modified_base 19: mod_base = OTHER; note = 2'-deoxy-2'-fluoro modified nucleotide
  modified_base 20..21: mod_base = OTHER; note = 2'-O-methyl modified nucleotide
  source 1..21: mol_type = other RNA
ttaatccaatctcttgcgctt

SEQ ID NO: 633 - DNA, 21 bp, synthetic construct
  misc_feature 1..21: note = Synthetic
  misc_feature 1..19: note = ribonucleotide unmodified or modified as described for this sequence
  misc_feature 1: note = Nucleotide linked to an inverted abasic cap
  modified_base 1..4: mod_base = OTHER; note = 2'-deoxy-2'-fluoro modified nucleotide
  modified_base 6..7: mod_base = OTHER; note = 2'-deoxy-2'-fluoro modified nucleotide
  modified_base 12..14: mod_base = OTHER; note = 2'-deoxy-2'-fluoro modified nucleotide
  modified_base 18: mod_base = OTHER; note = 2'-deoxy-2'-fluoro modified nucleotide
  misc_feature 21: note = Nucleotide linked to an inverted abasic cap
  source 1..21: mol_type = other DNA
  misc_feature 1..4: note = RNA
  misc_feature 5: note = DNA
  misc_feature 6..7: note = RNA
  misc_feature 8..11: note = DNA
  misc_feature 12..14: note = RNA
  misc_feature 15..17: note = DNA
  misc_feature 18: note = RNA
  misc_feature 19..21: note = DNA
ttccgttaaagtttaaatatt

SEQ ID NO: 634 - RNA, 21 nt, synthetic construct
  misc_feature 1..21: note = Synthetic
  modified_base 4..5: mod_base = OTHER; note = 2'-deoxy-2'-fluoro modified nucleotide
  modified_base 6..8: mod_base = OTHER; note = 2'-O-methyl modified nucleotide
  modified_base 9..12: mod_base = OTHER; note = 2'-deoxy-2'-fluoro modified nucleotide
  modified_base 13: mod_base = OTHER; note = 2'-O-methyl modified nucleotide
  modified_base 15: mod_base = OTHER; note = 2'-deoxy-2'-fluoro modified nucleotide
  modified_base 16..21: mod_base = OTHER; note = 2'-O-methyl modified nucleotide
  source 1..21: mol_type = other RNA
tatttaaactttaacggaatt

SEQ ID NO: 635 - DNA, 21 bp, synthetic construct
  misc_feature 1..21: note = Synthetic
  misc_feature 1..19: note = ribonucleotide unmodified or modified as described for this sequence
  misc_feature 1: note = Nucleotide linked to an inverted abasic cap
  modified_base 1: mod_base = OTHER; note = 2'-deoxy-2'-fluoro modified nucleotide
  modified_base 6..11: mod_base = OTHER; note = 2'-deoxy-2'-fluoro modified nucleotide
  modified_base 16: mod_base = OTHER; note = 2'-deoxy-2'-fluoro modified nucleotide
  misc_feature 21: note = Nucleotide linked to an inverted abasic cap
  source 1..21: mol_type = other DNA
  misc_feature 1: note = RNA
  misc_feature 2..5: note = DNA
  misc_feature 6..11: note = RNA
  misc_feature 12..15: note = DNA
  misc_feature 16: note = RNA
  misc_feature 17..21: note = DNA
cagggcttcttgaaatagatt

SEQ ID NO: 636 - RNA, 21 nt, synthetic construct
  misc_feature 1..21: note = Synthetic
  modified_base 4: mod_base = OTHER; note = 2'-O-methyl modified nucleotide
  modified_base 5..8: mod_base = OTHER; note = 2'-deoxy-2'-fluoro modified nucleotide
  modified_base 9..13: mod_base = OTHER; note = 2'-O-methyl modified nucleotide
  modified_base 15..18: mod_base = OTHER; note = 2'-deoxy-2'-fluoro modified nucleotide
  modified_base 19..21: mod_base = OTHER; note = 2'-O-methyl modified nucleotide
  source 1..21: mol_type = other RNA
tctatttcaagaagccctgtt

SEQ ID NO: 637 - DNA, 21 bp, synthetic construct
  misc_feature 1..21: note = Synthetic
  misc_feature 1..19: note = ribonucleotide unmodified or modified as described for this sequence
  misc_feature 1: note = Nucleotide linked to an inverted abasic cap
  modified_base 1..2: mod_base = OTHER; note = 2'-deoxy-2'-fluoro modified nucleotide
  modified_base 4: mod_base = OTHER; note = 2'-deoxy-2'-fluoro modified nucleotide
  modified_base 6..7: mod_base = OTHER; note = 2'-deoxy-2'-fluoro modified nucleotide
  modified_base 9: mod_base = OTHER; note = 2'-deoxy-2'-fluoro modified nucleotide
  modified_base 11: mod_base = OTHER; note = 2'-deoxy-2'-fluoro modified nucleotide
  modified_base 13: mod_base = OTHER; note = 2'-deoxy-2'-fluoro modified nucleotide
  modified_base 17: mod_base = OTHER; note = 2'-deoxy-2'-fluoro modified nucleotide
  misc_feature 21: note = Nucleotide linked to an inverted abasic cap
  source 1..21: mol_type = other DNA
  misc_feature 1..2: note = RNA
  misc_feature 3: note = DNA
  misc_feature 4: note = RNA
  misc_feature 5: note = DNA
  misc_feature 6..7: note = RNA
  misc_feature 8: note = DNA
  misc_feature 9: note = RNA
  misc_feature 10: note = DNA
  misc_feature 11: note = RNA
  misc_feature 12: note = DNA
  misc_feature 13: note = RNA
  misc_feature 14..16: note = DNA
  misc_feature 17: note = RNA
  misc_feature 18..21: note = DNA
tcgtgccgtgcatgaacaatt

SEQ ID NO: 638 - RNA, 21 nt, synthetic construct
  misc_feature 1..21: note = Synthetic
  modified_base 4..6: mod_base = OTHER; note = 2'-deoxy-2'-fluoro modified nucleotide
  modified_base 7: mod_base = OTHER; note = 2'-O-methyl modified nucleotide
  modified_base 8: mod_base = OTHER; note = 2'-deoxy-2'-fluoro modified nucleotide
  modified_base 9: mod_base = OTHER; note = 2'-O-methyl modified nucleotide
  modified_base 10: mod_base = OTHER; note = 2'-deoxy-2'-fluoro modified nucleotide
  modified_base 11: mod_base = OTHER; note = 2'-O-methyl modified nucleotide
  modified_base 12: mod_base = OTHER; note = 2'-deoxy-2'-fluoro modified nucleotide
  modified_base 13: mod_base = OTHER; note = 2'-O-methyl modified nucleotide
  modified_base 15: mod_base = OTHER; note = 2'-deoxy-2'-fluoro modified nucleotide
  modified_base 16: mod_base = OTHER; note = 2'-O-methyl modified nucleotide
  modified_base 17: mod_base = OTHER; note = 2'-deoxy-2'-fluoro modified nucleotide
  modified_base 18..21: mod_base = OTHER; note = 2'-O-methyl modified nucleotide
  source 1..21: mol_type = other RNA
ttgttcatgcacggcacgatt

SEQ ID NO: 639 - DNA, 21 bp, synthetic construct
  misc_feature 1..21: note = Synthetic
  misc_feature 1..19: note = ribonucleotide unmodified or modified as described for this sequence
  misc_feature 1: note = Nucleotide linked to an inverted abasic cap
  modified_base 4: mod_base = OTHER; note = 2'-deoxy-2'-fluoro modified nucleotide
  modified_base 6: mod_base = OTHER; note = 2'-deoxy-2'-fluoro modified nucleotide
  modified_base 8: mod_base = OTHER; note = 2'-deoxy-2'-fluoro modified nucleotide
  modified_base 10..13: mod_base = OTHER; note = 2'-deoxy-2'-fluoro modified nucleotide
  modified_base 15: mod_base = OTHER; note = 2'-deoxy-2'-fluoro modified nucleotide
  modified_base 17: mod_base = OTHER; note = 2'-deoxy-2'-fluoro modified nucleotide
  misc_feature 21: note = Nucleotide linked to an inverted abasic cap
  source 1..21: mol_type = other DNA
  misc_feature 1..3: note = DNA
  misc_feature 4: note = RNA
  misc_feature 5: note = DNA
  misc_feature 6: note = RNA
  misc_feature 7: note = DNA
  misc_feature 8: note = RNA
  misc_feature 9: note = DNA
  misc_feature 10..13: note = RNA
  misc_feature 14: note = DNA
  misc_feature 15: note = RNA
  misc_feature 16: note = DNA
  misc_feature 17: note = RNA
  misc_feature 18..21: note = DNA
aggtgcgcgccctgcacgatt

SEQ ID NO: 640 - RNA, 21 nt, synthetic construct
  misc_feature 1..21: note = Synthetic
  modified_base 4: mod_base = OTHER; note = 2'-deoxy-2'-fluoro modified nucleotide
  modified_base 5: mod_base = OTHER; note = 2'-O-methyl modified nucleotide
  modified_base 6: mod_base = OTHER; note = 2'-deoxy-2'-fluoro modified nucleotide
  modified_base 7..10: mod_base = OTHER; note = 2'-O-methyl modified nucleotide
  modified_base 11: mod_base = OTHER; note = 2'-deoxy-2'-fluoro modified nucleotide
  modified_base 12: mod_base = OTHER; note = 2'-O-methyl modified nucleotide
  modified_base 13: mod_base = OTHER; note = 2'-deoxy-2'-fluoro modified nucleotide
  modified_base 15: mod_base = OTHER; note = 2'-deoxy-2'-fluoro modified nucleotide
  modified_base 16: mod_base = OTHER; note = 2'-O-methyl modified nucleotide
  modified_base 17..19: mod_base = OTHER; note = 2'-deoxy-2'-fluoro modified nucleotide
  modified_base 20..21: mod_base = OTHER; note = 2'-O-methyl modified nucleotide
  source 1..21: mol_type = other RNA
tcgtgcagggcgcgcaccttt

SEQ ID NO: 641 - DNA, 21 bp, synthetic construct
  misc_feature 1..21: note = Synthetic
  misc_feature 1..19: note = ribonucleotide unmodified or modified as described for this sequence
  misc_feature 1: note = Nucleotide linked to an inverted abasic cap
  modified_base 5..6: mod_base = OTHER; note = 2'-deoxy-2'-fluoro modified nucleotide
  modified_base 8..9: mod_base = OTHER; note = 2'-deoxy-2'-fluoro modified nucleotide
  modified_base 13..14: mod_base = OTHER; note = 2'-deoxy-2'-fluoro modified nucleotide
  modified_base 16..18: mod_base = OTHER; note = 2'-deoxy-2'-fluoro modified nucleotide
  misc_feature 21: note = Nucleotide linked to an inverted abasic cap
  source 1..21: mol_type = other DNA
  misc_feature 1..4: note = DNA
  misc_feature 5..6: note = RNA
  misc_feature 7: note = DNA
  misc_feature 8..9: note = RNA
  misc_feature 10..12: note = DNA
  misc_feature 13..14: note = RNA
  misc_feature 15: note = DNA
  misc_feature 16..18: note = RNA
  misc_feature 19..21: note = DNA
gaaaccattgggctgctcatt

SEQ ID NO: 642 - RNA, 21 nt, synthetic construct
  misc_feature 1..21: note = Synthetic
  modified_base 4: mod_base = OTHER; note = 2'-O-methyl modified nucleotide
  modified_base 5: mod_base = OTHER; note = 2'-deoxy-2'-fluoro modified nucleotide
  modified_base 6..7: mod_base = OTHER; note = 2'-O-methyl modified nucleotide
  modified_base 8..10: mod_base = OTHER; note = 2'-deoxy-2'-fluoro modified nucleotide
  modified_base 11..12: mod_base = OTHER; note = 2'-O-methyl modified nucleotide
  modified_base 13: mod_base = OTHER; note = 2'-deoxy-2'-fluoro modified nucleotide
  modified_base 15: mod_base = OTHER; note = 2'-O-methyl modified nucleotide
  modified_base 16..19: mod_base = OTHER; note = 2'-deoxy-2'-fluoro modified nucleotide
  modified_base 20..21: mod_base = OTHER; note = 2'-O-methyl modified nucleotide
  source 1..21: mol_type = other RNA
tgagcagcccaatggtttctt

SEQ ID NO: 643 - DNA, 21 bp, synthetic construct
  misc_feature 1..21: note = Synthetic
  misc_feature 1..19: note = ribonucleotide unmodified or modified as described for this sequence
  misc_feature 1: note = Nucleotide linked to an inverted abasic cap
  modified_base 1: mod_base = OTHER; note = 2'-deoxy-2'-fluoro modified nucleotide
  modified_base 3: mod_base = OTHER; note = 2'-deoxy-2'-fluoro modified nucleotide
  modified_base 6..8: mod_base = OTHER; note = 2'-deoxy-2'-fluoro modified nucleotide
  modified_base 11: mod_base = OTHER; note = 2'-deoxy-2'-fluoro modified nucleotide
  modified_base 15: mod_base = OTHER; note = 2'-deoxy-2'-fluoro modified nucleotide
  modified_base 19: mod_base = OTHER; note = 2'-deoxy-2'-fluoro modified nucleotide
  misc_feature 21: note = Nucleotide linked to an inverted abasic cap
  source 1..21: mol_type = other DNA
  misc_feature 1: note = RNA
  misc_feature 2: note = DNA
  misc_feature 3: note = RNA
  misc_feature 4..5: note = DNA
  misc_feature 6..8: note = RNA
  misc_feature 9..10: note = DNA
  misc_feature 11: note = RNA
  misc_feature 12..14: note = DNA
  misc_feature 15: note = RNA
  misc_feature 16..18: note = DNA
  misc_feature 19: note = RNA
  misc_feature 20..21: note = DNA
tgcggcccaacgggcagactt

SEQ ID NO: 644 - RNA, 21 nt, synthetic construct
  misc_feature 1..21: note = Synthetic
  modified_base 4: mod_base = OTHER; note = 2'-deoxy-2'-fluoro modified nucleotide
  modified_base 5: mod_base = OTHER; note = 2'-O-methyl modified nucleotide
  modified_base 6..8: mod_base = OTHER; note = 2'-deoxy-2'-fluoro modified nucleotide
  modified_base 9: mod_base = OTHER; note = 2'-O-methyl modified nucleotide
  modified_base 10..11: mod_base = OTHER; note = 2'-deoxy-2'-fluoro modified nucleotide
  modified_base 12..13: mod_base = OTHER; note = 2'-O-methyl modified nucleotide
  modified_base 15..16: mod_base = OTHER; note = 2'-deoxy-2'-fluoro modified nucleotide
  modified_base 17: mod_base = OTHER; note = 2'-O-methyl modified nucleotide
  modified_base 18: mod_base = OTHER; note = 2'-deoxy-2'-fluoro modified nucleotide
  modified_base 19..21: mod_base = OTHER; note = 2'-O-methyl modified nucleotide
  source 1..21: mol_type = other RNA
gtctgcccgttgggccgcatt

SEQ ID NO: 645 - DNA, 21 bp, synthetic construct
  misc_feature 1..21: note = Synthetic
  misc_feature 1..19: note = ribonucleotide unmodified or modified as described for this sequence
  misc_feature 1: note = Nucleotide linked to an inverted abasic cap
  modified_base 2: mod_base = OTHER; note = 2'-deoxy-2'-fluoro modified nucleotide
  modified_base 8..9: mod_base = OTHER; note = 2'-deoxy-2'-fluoro modified nucleotide
  modified_base 13..15: mod_base = OTHER; note = 2'-deoxy-2'-fluoro modified nucleotide
  modified_base 18: mod_base = OTHER; note = 2'-deoxy-2'-fluoro modified nucleotide
  misc_feature 21: note = Nucleotide linked to an inverted abasic cap
  source 1..21: mol_type = other DNA
  misc_feature 1: note = DNA
  misc_feature 2: note = RNA
  misc_feature 3..7: note = DNA
  misc_feature 8..9: note = RNA
  misc_feature 10..12: note = DNA
  misc_feature 13..15: note = RNA
  misc_feature 16..17: note = DNA
  misc_feature 18: note = RNA
  misc_feature 19..21: note = DNA
gtgagggttgaactcaatatt

SEQ ID NO: 646 - RNA, 21 nt, synthetic construct
  misc_feature 1..21: note = Synthetic
  modified_base 4: mod_base = OTHER; note = 2'-deoxy-2'-fluoro modified nucleotide
  modified_base 5..7: mod_base = OTHER; note = 2'-O-methyl modified nucleotide
  modified_base 8..10: mod_base = OTHER; note = 2'-deoxy-2'-fluoro modified nucleotide
  modified_base 11..12: mod_base = OTHER; note = 2'-O-methyl modified nucleotide
  modified_base 13..17: mod_base = OTHER; note = 2'-deoxy-2'-fluoro modified nucleotide
  modified_base 18: mod_base = OTHER; note = 2'-O-methyl modified nucleotide
  modified_base 19: mod_base = OTHER; note = 2'-deoxy-2'-fluoro modified nucleotide
  modified_base 20..21: mod_base = OTHER; note = 2'-O-methyl modified nucleotide
  source 1..21: mol_type = other RNA
tattgagttcaaccctcactt

SEQ ID NO: 647 - DNA, 21 bp, synthetic construct
  misc_feature 1..21: note = Synthetic
  misc_feature 1..19: note = ribonucleotide unmodified or modified as described for this sequence
  misc_feature 1: note = Nucleotide linked to an inverted abasic cap
  modified_base 1: mod_base = OTHER; note = 2'-deoxy-2'-fluoro modified nucleotide
  modified_base 3..4: mod_base = OTHER; note = 2'-deoxy-2'-fluoro modified nucleotide
  modified_base 6: mod_base = OTHER; note = 2'-deoxy-2'-fluoro modified nucleotide
  modified_base 8: mod_base = OTHER; note = 2'-deoxy-2'-fluoro modified nucleotide
  modified_base 10: mod_base = OTHER; note = 2'-deoxy-2'-fluoro modified nucleotide
  modified_base 14: mod_base = OTHER; note = 2'-deoxy-2'-fluoro modified nucleotide
  modified_base 18: mod_base = OTHER; note = 2'-deoxy-2'-fluoro modified nucleotide
  misc_feature 21: note = Nucleotide linked to an inverted abasic cap
  source 1..21: mol_type = other DNA
  misc_feature 1: note = RNA
  misc_feature 2: note = DNA
  misc_feature 3..4: note = RNA
  misc_feature 5: note = DNA
  misc_feature 6: note = RNA
  misc_feature 7: note = DNA
  misc_feature 8: note = RNA
  misc_feature 9: note = DNA
  misc_feature 10: note = RNA
  misc_feature 11..13: note = DNA
  misc_feature 14: note = RNA
  misc_feature 15..17: note = DNA
  misc_feature 18: note = RNA
  misc_feature 19..21: note = DNA
tgccgtgcatgaacaagcatt

SEQ ID NO: 648 - RNA, 21 nt, synthetic construct
  misc_feature 1..21: note = Synthetic
  modified_base 4..5: mod_base = OTHER; note = 2'-deoxy-2'-fluoro modified nucleotide
  modified_base 6: mod_base = OTHER; note = 2'-O-methyl modified nucleotide
  modified_base 7..9: mod_base = OTHER; note = 2'-deoxy-2'-fluoro modified nucleotide
  modified_base 10: mod_base = OTHER; note = 2'-O-methyl modified nucleotide
  modified_base 11: mod_base = OTHER; note = 2'-deoxy-2'-fluoro modified nucleotide
  modified_base 12: mod_base = OTHER; note = 2'-O-methyl modified nucleotide
  modified_base 13: mod_base = OTHER; note = 2'-deoxy-2'-fluoro modified nucleotide
  modified_base 15: mod_base = OTHER; note = 2'-deoxy-2'-fluoro modified nucleotide
  modified_base 16..17: mod_base = OTHER; note = 2'-O-methyl modified nucleotide
  modified_base 18: mod_base = OTHER; note = 2'-deoxy-2'-fluoro modified nucleotide
  modified_base 19..21: mod_base = OTHER; note = 2'-O-methyl modified nucleotide
  source 1..21: mol_type = other RNA
tgcttgttcatgcacggcatt

SEQ ID NO: 649 - DNA, 21 bp, synthetic construct
  misc_feature 1..21: note = Synthetic
  misc_feature 1..19: note = ribonucleotide unmodified or modified as described for this sequence
  misc_feature 1: note = Nucleotide linked to an inverted abasic cap
  modified_base 2: mod_base = OTHER; note = 2'-deoxy-2'-fluoro modified nucleotide
  modified_base 9..10: mod_base = OTHER; note = 2'-deoxy-2'-fluoro modified nucleotide
  modified_base 14..15: mod_base = OTHER; note = 2'-deoxy-2'-fluoro modified nucleotide
  modified_base 18: mod_base = OTHER; note = 2'-deoxy-2'-fluoro modified nucleotide
  misc_feature 21: note = Nucleotide linked to an inverted abasic cap
  source 1..21: mol_type = other DNA
  misc_feature 1: note = DNA
  misc_feature 2: note = RNA
  misc_feature 3..8: note = DNA
  misc_feature 9..10: note = RNA
  misc_feature 11..13: note = DNA
  misc_feature 14..15: note = RNA
  misc_feature 16..17: note = DNA
  misc_feature 18: note = RNA
  misc_feature 19..21: note = DNA
gcaagagattggattaacatt

SEQ ID NO: 650 - RNA, 21 nt, synthetic construct
  misc_feature 1..21: note = Synthetic
  modified_base 4: mod_base = OTHER; note = 2'-deoxy-2'-fluoro modified nucleotide
  modified_base 5..6: mod_base = OTHER; note = 2'-O-methyl modified nucleotide
  modified_base 7..9: mod_base = OTHER; note = 2'-deoxy-2'-fluoro modified nucleotide
  modified_base 10..11: mod_base = OTHER; note = 2'-O-methyl modified nucleotide
  modified_base 12..17: mod_base = OTHER; note = 2'-deoxy-2'-fluoro modified nucleotide
  modified_base 18: mod_base = OTHER; note = 2'-O-methyl modified nucleotide
  modified_base 19: mod_base = OTHER; note = 2'-deoxy-2'-fluoro modified nucleotide
  modified_base 20..21: mod_base = OTHER; note = 2'-O-methyl modified nucleotide
  source 1..21: mol_type = other RNA
tgttaatccaatctcttgctt

SEQ ID NO: 651 - DNA, 21 bp, synthetic construct
  misc_feature 1..21: note = Synthetic
  misc_feature 1..19: note = ribonucleotide unmodified or modified as described for this sequence
  misc_feature 1: note = Nucleotide linked to an inverted abasic cap
  modified_base 1..3: mod_base = OTHER; note = 2'-deoxy-2'-fluoro modified nucleotide
  modified_base 5..7: mod_base = OTHER; note = 2'-deoxy-2'-fluoro modified nucleotide
  modified_base 10: mod_base = OTHER; note = 2'-deoxy-2'-fluoro modified nucleotide
  modified_base 12..16: mod_base = OTHER; note = 2'-deoxy-2'-fluoro modified nucleotide
  modified_base 19: mod_base = OTHER; note = 2'-deoxy-2'-fluoro modified nucleotide
  misc_feature 21: note = Nucleotide linked to an inverted abasic cap
  source 1..21: mol_type = other DNA
  misc_feature 1..3: note = RNA
  misc_feature 4: note = DNA
  misc_feature 5..7: note = RNA
  misc_feature 8..9: note = DNA
  misc_feature 10: note = RNA
  misc_feature 11: note = DNA
  misc_feature 12..16: note = RNA
  misc_feature 17..18: note = DNA
  misc_feature 19: note = RNA
  misc_feature 20..21: note = DNA
cccacctagtgctcctaattt

SEQ ID NO: 652 - RNA, 21 nt, synthetic construct
  misc_feature 1..21: note = Synthetic
  modified_base 4..8: mod_base = OTHER; note = 2'-O-methyl modified nucleotide
  modified_base 9: mod_base = OTHER; note = 2'-deoxy-2'-fluoro modified nucleotide
  modified_base 10: mod_base = OTHER; note = 2'-O-methyl modified nucleotide
  modified_base 11..12: mod_base = OTHER; note = 2'-deoxy-2'-fluoro modified nucleotide
  modified_base 13: mod_base = OTHER; note = 2'-O-methyl modified nucleotide
  modified_base 15: mod_base = OTHER; note = 2'-O-methyl modified nucleotide
  modified_base 16: mod_base = OTHER; note = 2'-deoxy-2'-fluoro modified nucleotide
  modified_base 17..21: mod_base = OTHER; note = 2'-O-methyl modified nucleotide
  source 1..21: mol_type = other RNA
attaggagcactaggtgggtt

SEQ ID NO: 653 - DNA, 21 bp, synthetic construct
  misc_feature 1..21: note = Synthetic
  misc_feature 1..19: note = ribonucleotide unmodified or modified as described for this sequence
  misc_feature 1: note = Nucleotide linked to an inverted abasic cap
  modified_base 1: mod_base = OTHER; note = 2'-deoxy-2'-fluoro modified nucleotide
  modified_base 3..4: mod_base = OTHER; note = 2'-deoxy-2'-fluoro modified nucleotide
  modified_base 6: mod_base = OTHER; note = 2'-deoxy-2'-fluoro modified nucleotide
  modified_base 8..9: mod_base = OTHER; note = 2'-deoxy-2'-fluoro modified nucleotide
  modified_base 11: mod_base = OTHER; note = 2'-deoxy-2'-fluoro modified nucleotide
  modified_base 13: mod_base = OTHER; note = 2'-deoxy-2'-fluoro modified nucleotide
  modified_base 15: mod_base = OTHER; note = 2'-deoxy-2'-fluoro modified nucleotide
  modified_base 19: mod_base = OTHER; note = 2'-deoxy-2'-fluoro modified nucleotide
  misc_feature 21: note = Nucleotide linked to an inverted abasic cap
  source 1..21: mol_type = other DNA
  misc_feature 1: note = RNA
  misc_feature 2: note = DNA
  misc_feature 3..4: note = RNA
  misc_feature 5: note = DNA
  misc_feature 6: note = RNA
  misc_feature 7: note = DNA
  misc_feature 8..9: note = RNA
  misc_feature 10: note = DNA
  misc_feature 11: note = RNA
  misc_feature 12: note = DNA
  misc_feature 13: note = RNA
  misc_feature 14: note = DNA
  misc_feature 15: note = RNA
  misc_feature 16..18: note = DNA
  misc_feature 19: note = RNA
  misc_feature 20..21: note = DNA
catcgtgccgtgcatgaactt

SEQ ID NO: 654 - RNA, 21 nt, synthetic construct
  misc_feature 1..21: note = Synthetic
  modified_base 4: mod_base = OTHER; note = 2'-deoxy-2'-fluoro modified nucleotide
  modified_base 5: mod_base = OTHER; note = 2'-O-methyl modified nucleotide
  modified_base 6: mod_base = OTHER; note = 2'-deoxy-2'-fluoro modified nucleotide
  modified_base 7: mod_base = OTHER; note = 2'-O-methyl modified nucleotide
  modified_base 8: mod_base = OTHER; note = 2'-deoxy-2'-fluoro modified nucleotide
  modified_base 9: mod_base = OTHER; note = 2'-O-methyl modified nucleotide
  modified_base 10: mod_base = OTHER; note = 2'-deoxy-2'-fluoro modified nucleotide
  modified_base 11..12: mod_base = OTHER; note = 2'-O-methyl modified nucleotide
  modified_base 13: mod_base = OTHER; note = 2'-deoxy-2'-fluoro modified nucleotide
  modified_base 15: mod_base = OTHER; note = 2'-deoxy-2'-fluoro modified nucleotide
  modified_base 16..17: mod_base = OTHER; note = 2'-O-methyl modified nucleotide
  modified_base 18: mod_base = OTHER; note = 2'-deoxy-2'-fluoro modified nucleotide
  modified_base 19..21: mod_base = OTHER; note = 2'-O-methyl modified nucleotide
  source 1..21: mol_type = other RNA
gttcatgcacggcacgatgtt

SEQ ID NO: 655 - DNA, 21 bp, synthetic construct
  misc_feature 1..21: note = Synthetic
  misc_feature 1..19: note = ribonucleotide unmodified or modified as described for this sequence
  misc_feature 1: note = Nucleotide linked to an inverted abasic cap
  modified_base 1: mod_base = OTHER; note = 2'-deoxy-2'-fluoro modified nucleotide
  modified_base 3: mod_base = OTHER; note = 2'-deoxy-2'-fluoro modified nucleotide
  modified_base 5..6: mod_base = OTHER; note = 2'-deoxy-2'-fluoro modified nucleotide
  modified_base 8: mod_base = OTHER; note = 2'-deoxy-2'-fluoro modified nucleotide
  modified_base 10..11: mod_base = OTHER; note = 2'-deoxy-2'-fluoro modified nucleotide
  modified_base 13: mod_base = OTHER; note = 2'-deoxy-2'-fluoro modified nucleotide
  modified_base 15: mod_base = OTHER; note = 2'-deoxy-2'-fluoro modified nucleotide
  modified_base 17: mod_base = OTHER; note = 2'-deoxy-2'-fluoro modified nucleotide
  misc_feature 21: note = Nucleotide linked to an inverted abasic cap
  source 1..21: mol_type = other DNA
  misc_feature 1: note = RNA
  misc_feature 2: note = DNA
  misc_feature 3: note = RNA
  misc_feature 4: note = DNA
  misc_feature 5..6: note = RNA
  misc_feature 7: note = DNA
  misc_feature 8: note = RNA
  misc_feature 9: note = DNA
  misc_feature 10..11: note = RNA
  misc_feature 12: note = DNA
  misc_feature 13: note = RNA
  misc_feature 14: note = DNA
  misc_feature 15: note = RNA
  misc_feature 16: note = DNA
  misc_feature 17: note = RNA
  misc_feature 18..21: note = DNA
tacatcgtgccgtgcatgatt

SEQ ID NO: 656 - RNA, 21 nt, synthetic construct
  misc_feature 1..21: note = Synthetic
  modified_base 4: mod_base = OTHER; note = 2'-deoxy-2'-fluoro modified nucleotide
  modified_base 5: mod_base = OTHER; note = 2'-O-methyl modified nucleotide
  modified_base 6: mod_base = OTHER; note = 2'-deoxy-2'-fluoro modified nucleotide
  modified_base 7: mod_base = OTHER; note = 2'-O-methyl modified nucleotide
  modified_base 8: mod_base = OTHER; note = 2'-deoxy-2'-fluoro modified nucleotide
  modified_base 9..10: mod_base = OTHER; note = 2'-O-methyl modified nucleotide
  modified_base 11: mod_base = OTHER; note = 2'-deoxy-2'-fluoro modified nucleotide
  modified_base 12: mod_base = OTHER; note = 2'-O-methyl modified nucleotide
  modified_base 13: mod_base = OTHER; note = 2'-deoxy-2'-fluoro modified nucleotide
  modified_base 15: mod_base = OTHER; note = 2'-O-methyl modified nucleotide
  modified_base 16: mod_base = OTHER; note = 2'-deoxy-2'-fluoro modified nucleotide
  modified_base 17: mod_base = OTHER; note = 2'-O-methyl modified nucleotide
  modified_base 18: mod_base = OTHER; note = 2'-deoxy-2'-fluoro modified nucleotide
  modified_base 19..21: mod_base = OTHER; note = 2'-O-methyl modified nucleotide
  source 1..21: mol_type = other RNA
tcatgcacggcacgatgtatt

SEQ ID NO: 657 - DNA, 21 bp, synthetic construct
  misc_feature 1..21: note = Synthetic
  misc_feature 1..19: note = ribonucleotide unmodified or modified as described for this sequence
  misc_feature 1: note = Nucleotide linked to an inverted abasic cap
  modified_base 1..2: mod_base = OTHER; note = 2'-deoxy-2'-fluoro modified nucleotide
  modified_base 4: mod_base = OTHER; note = 2'-deoxy-2'-fluoro modified nucleotide
  modified_base 6: mod_base = OTHER; note = 2'-deoxy-2'-fluoro modified nucleotide
  modified_base 8: mod_base = OTHER; note = 2'-deoxy-2'-fluoro modified nucleotide
  modified_base 12: mod_base = OTHER; note = 2'-deoxy-2'-fluoro modified nucleotide
  modified_base 16: mod_base = OTHER; note = 2'-deoxy-2'-fluoro modified nucleotide
  modified_base 18: mod_base = OTHER; note = 2'-deoxy-2'-fluoro modified nucleotide
  misc_feature 21: note = Nucleotide linked to an inverted abasic cap
  source 1..21: mol_type = other DNA
  misc_feature 1..2: note = RNA
  misc_feature 3: note = DNA
  misc_feature 4: note = RNA
  misc_feature 5: note = DNA
  misc_feature 6: note = RNA
  misc_feature 7: note = DNA
  misc_feature 8: note = RNA
  misc_feature 9..11: note = DNA
  misc_feature 12: note = RNA
  misc_feature 13..15: note = DNA
  misc_feature 16: note = RNA
  misc_feature 17: note = DNA
  misc_feature 18: note = RNA
  misc_feature 19..21: note = DNA
ccgtgcatgaacaagcacgtt

SEQ ID NO: 658 - RNA, 21 nt, synthetic construct
  misc_feature 1..21: note = Synthetic
  modified_base 4: mod_base = OTHER; note = 2'-O-methyl modified nucleotide
  modified_base 5..7: mod_base = OTHER; note = 2'-deoxy-2'-fluoro modified nucleotide
  modified_base 8: mod_base = OTHER; note = 2'-O-methyl modified nucleotide
  modified_base 9..11: mod_base = OTHER; note = 2'-deoxy-2'-fluoro modified nucleotide
  modified_base 12: mod_base = OTHER; note = 2'-O-methyl modified nucleotide
  modified_base 13: mod_base = OTHER; note = 2'-deoxy-2'-fluoro modified nucleotide
  modified_base 15: mod_base = OTHER; note = 2'-deoxy-2'-fluoro modified nucleotide
  modified_base 16: mod_base = OTHER; note = 2'-O-methyl modified nucleotide
  modified_base 17: mod_base = OTHER; note = 2'-deoxy-2'-fluoro modified nucleotide
  modified_base 18..21: mod_base = OTHER; note = 2'-O-methyl modified nucleotide
  source 1..21: mol_type = other RNA
cgtgcttgttcatgcacggtt

SEQ ID NO: 659 - DNA, 21 bp, synthetic construct
  misc_feature 1..21: note = Synthetic
  misc_feature 1..19: note = ribonucleotide unmodified or modified as described for this sequence
  misc_feature 1: note = Nucleotide linked to an inverted abasic cap
  modified_base 1: mod_base = OTHER; note = 2'-deoxy-2'-fluoro modified nucleotide
  modified_base 4: mod_base = OTHER; note = 2'-deoxy-2'-fluoro modified nucleotide
  modified_base 7: mod_base = OTHER; note = 2'-deoxy-2'-fluoro modified nucleotide
  modified_base 9..10: mod_base = OTHER; note = 2'-deoxy-2'-fluoro modified nucleotide
  modified_base 12..13: mod_base = OTHER; note = 2'-deoxy-2'-fluoro modified nucleotide
  modified_base 18..19: mod_base = OTHER; note = 2'-deoxy-2'-fluoro modified nucleotide
  misc_feature 21: note = Nucleotide linked to an inverted abasic cap
  source 1..21: mol_type = other DNA
  misc_feature 1: note = RNA
  misc_feature 2..3: note = DNA
  misc_feature 4: note = RNA
  misc_feature 5..6: note = DNA
  misc_feature 7: note = RNA
  misc_feature 8: note = DNA
  misc_feature 9..10: note = RNA
  misc_feature 11: note = DNA
  misc_feature 12..13: note = RNA
  misc_feature 14..17: note = DNA
  misc_feature 18..19: note = RNA
  misc_feature 20..21: note = DNA
cgacaatgctactggagtttt

SEQ ID NO: 660 - RNA, 21 nt, synthetic construct
  misc_feature 1..21: note = Synthetic
  modified_base 4..6: mod_base = OTHER; note = 2'-deoxy-2'-fluoro modified nucleotide
  modified_base 7..8: mod_base = OTHER; note = 2'-O-methyl modified nucleotide
  modified_base 9: mod_base = OTHER; note = 2'-deoxy-2'-fluoro modified nucleotide
  modified_base 10..11: mod_base = OTHER; note = 2'-O-methyl modified nucleotide
  modified_base 12: mod_base = OTHER; note = 2'-deoxy-2'-fluoro modified nucleotide
  modified_base 13: mod_base = OTHER; note = 2'-O-methyl modified nucleotide
  modified_base 14..15: mod_base = OTHER; note = 2'-deoxy-2'-fluoro modified nucleotide
  modified_base 16: mod_base = OTHER; note = 2'-O-methyl modified nucleotide
  modified_base 17..18: mod_base = OTHER; note = 2'-deoxy-2'-fluoro modified nucleotide
  modified_base 19..21: mod_base = OTHER; note = 2'-O-methyl modified nucleotide
  source 1..21: mol_type = other RNA
aactccagtagcattgtcgtt

SEQ ID NO: 661 - DNA, 21 bp, synthetic construct
  misc_feature 1..21: note = Synthetic
  misc_feature 1..19: note = ribonucleotide unmodified or modified as described for this sequence
  misc_feature 1: note = Nucleotide linked to an inverted abasic cap
  modified_base 2: mod_base = OTHER; note = 2'-deoxy-2'-fluoro modified nucleotide
  modified_base 4: mod_base = OTHER; note = 2'-deoxy-2'-fluoro modified nucleotide
  modified_base 7: mod_base = OTHER; note = 2'-deoxy-2'-fluoro modified nucleotide
  modified_base 9: mod_base = OTHER; note = 2'-deoxy-2'-fluoro modified nucleotide
  modified_base 13..16: mod_base = OTHER; note = 2'-deoxy-2'-fluoro modified nucleotide
  modified_base 18..19: mod_base = OTHER; note = 2'-deoxy-2'-fluoro modified nucleotide
  misc_feature 21: note = Nucleotide linked to an inverted abasic cap
  source 1..21: mol_type = other DNA
  misc_feature 1: note = DNA
  misc_feature 2: note = RNA
  misc_feature 3: note = DNA
  misc_feature 4: note = RNA
  misc_feature 5..6: note = DNA
  misc_feature 7: note = RNA
  misc_feature 8: note = DNA
  misc_feature 9: note = RNA
  misc_feature 10..12: note = DNA
  misc_feature 13..16: note = RNA
  misc_feature 17: note = DNA
  misc_feature 18..19: note = RNA
  misc_feature 20..21: note = DNA
gcgcagcacagattctatttt

SEQ ID NO: 662 - RNA, 21 nt, synthetic construct
  misc_feature 1..21: note = Synthetic
  modified_base 4..7: mod_base = OTHER; note = 2'-O-methyl modified nucleotide
  modified_base 8..10: mod_base = OTHER; note = 2'-deoxy-2'-fluoro modified nucleotide
  modified_base 11: mod_base = OTHER; note = 2'-O-methyl modified nucleotide
  modified_base 12: mod_base = OTHER; note = 2'-deoxy-2'-fluoro modified nucleotide
  modified_base 13: mod_base = OTHER; note = 2'-O-methyl modified nucleotide
  modified_base 14..15: mod_base = OTHER; note = 2'-deoxy-2'-fluoro modified nucleotide
  modified_base 16: mod_base = OTHER; note = 2'-O-methyl modified nucleotide
  modified_base 17: mod_base = OTHER; note = 2'-deoxy-2'-fluoro modified nucleotide
  modified_base 18: mod_base = OTHER; note = 2'-O-methyl modified nucleotide
  modified_base 19: mod_base = OTHER; note = 2'-deoxy-2'-fluoro modified nucleotide
  modified_base 20..21: mod_base = OTHER; note = 2'-O-methyl modified nucleotide
  source 1..21: mol_type = other RNA
aatagaatctgtgctgcgctt

SEQ ID NO: 663 - DNA, 21 bp, synthetic construct
  misc_feature 1..21: note = Synthetic
  misc_feature 1..19: note = ribonucleotide unmodified or modified as described for this sequence
  misc_feature 1: note = Nucleotide linked to an inverted abasic cap
  modified_base 2: mod_base = OTHER; note = 2'-deoxy-2'-fluoro modified nucleotide
  modified_base 6: mod_base = OTHER; note = 2'-deoxy-2'-fluoro modified nucleotide
  modified_base 8..9: mod_base = OTHER; note = 2'-deoxy-2'-fluoro modified nucleotide
  modified_base 11: mod_base = OTHER; note = 2'-deoxy-2'-fluoro modified nucleotide
  modified_base 13: mod_base = OTHER; note = 2'-deoxy-2'-fluoro modified nucleotide
  modified_base 15: mod_base = OTHER; note = 2'-deoxy-2'-fluoro modified nucleotide
  modified_base 17..19: mod_base = OTHER; note = 2'-deoxy-2'-fluoro modified nucleotide
  misc_feature 21: note = Nucleotide linked to an inverted abasic cap
  source 1..21: mol_type = other DNA
  misc_feature 1: note = DNA
  misc_feature 2: note = RNA
  misc_feature 3..5: note = DNA
  misc_feature 6: note = RNA
  misc_feature 7: note = DNA
  misc_feature 8..9: note = RNA
  misc_feature 10: note = DNA
  misc_feature 11: note = RNA
  misc_feature 12: note = DNA
  misc_feature 13: note = RNA
  misc_feature 14: note = DNA
  misc_feature 15: note = RNA
  misc_feature 16: note = DNA
  misc_feature 17..19: note = RNA
  misc_feature 20..21: note = DNA
gcaagcaccacatgtgttttt

SEQ ID NO: 664 - RNA, 21 nt, synthetic construct
  misc_feature 1..21: note = Synthetic
  modified_base 4: mod_base = OTHER; note = 2'-deoxy-2'-fluoro modified nucleotide
  modified_base 5: mod_base = OTHER; note = 2'-O-methyl modified nucleotide
  modified_base 6: mod_base = OTHER; note = 2'-deoxy-2'-fluoro modified nucleotide
  modified_base 7: mod_base = OTHER; note = 2'-O-methyl modified nucleotide
  modified_base 8: mod_base = OTHER; note = 2'-deoxy-2'-fluoro modified nucleotide
  modified_base 9: mod_base = OTHER; note = 2'-O-methyl modified nucleotide
  modified_base 10: mod_base = OTHER; note = 2'-deoxy-2'-fluoro modified nucleotide
  modified_base 11..12: mod_base = OTHER; note = 2'-O-methyl modified nucleotide
  modified_base 13: mod_base = OTHER; note = 2'-deoxy-2'-fluoro modified nucleotide
  modified_base 14: mod_base = OTHER; note = 2'-O-methyl modified nucleotide
  modified_base 15..17: mod_base = OTHER; note = 2'-deoxy-2'-fluoro modified nucleotide
  modified_base 18: mod_base = OTHER; note = 2'-O-methyl modified nucleotide
  modified_base 19: mod_base = OTHER; note = 2'-deoxy-2'-fluoro modified nucleotide
  modified_base 20..21: mod_base = OTHER; note = 2'-O-methyl modified nucleotide
  source 1..21: mol_type = other RNA
aaacacatgtggtgcttgctt

SEQ ID NO: 665 - DNA, 21 bp, synthetic construct
  misc_feature 1..21: note = Synthetic
  misc_feature 1..19: note = ribonucleotide unmodified or modified as described for this sequence
  misc_feature 1: note = Nucleotide linked to an inverted abasic cap
  modified_base 1: mod_base = OTHER; note = 2'-deoxy-2'-fluoro modified nucleotide
  modified_base 3: mod_base = OTHER; note = 2'-deoxy-2'-fluoro modified nucleotide
  modified_base 6: mod_base = OTHER; note = 2'-deoxy-2'-fluoro modified nucleotide
  modified_base 8: mod_base = OTHER; note = 2'-deoxy-2'-fluoro modified nucleotide
  modified_base 12..15: mod_base = OTHER; note = 2'-deoxy-2'-fluoro modified nucleotide
  modified_base 17..18: mod_base = OTHER; note = 2'-deoxy-2'-fluoro modified nucleotide
  misc_feature 21: note = Nucleotide linked to an inverted abasic cap
  source 1..21: mol_type = other DNA
  misc_feature 1: note = RNA
  misc_feature 2: note = DNA
  misc_feature 3: note = RNA
  misc_feature 4..5: note = DNA
  misc_feature 6: note = RNA
  misc_feature 7: note = DNA
  misc_feature 8: note = RNA
  misc_feature 9..11: note = DNA
  misc_feature 12..15: note = RNA
  misc_feature 16: note = DNA
  misc_feature 17..18: note = RNA
  misc_feature 19..21: note = DNA
cgcagcacagattctattatt

SEQ ID NO: 666 - RNA, 21 nt, synthetic construct
  misc_feature 1..21: note = Synthetic
  modified_base 4: mod_base = OTHER; note = 2'-deoxy-2'-fluoro modified nucleotide
  modified_base 5..8: mod_base = OTHER; note = 2'-O-methyl modified nucleotide
  modified_base 9..11: mod_base = OTHER; note = 2'-deoxy-2'-fluoro modified nucleotide
  modified_base 12: mod_base = OTHER; note = 2'-O-methyl modified nucleotide
  modified_base 13: mod_base = OTHER; note = 2'-deoxy-2'-fluoro modified nucleotide
  modified_base 15..16: mod_base = OTHER; note = 2'-deoxy-2'-fluoro modified nucleotide
  modified_base 17: mod_base = OTHER; note = 2'-O-methyl modified nucleotide
  modified_base 18: mod_base = OTHER; note = 2'-deoxy-2'-fluoro modified nucleotide
  modified_base 19..21: mod_base = OTHER; note = 2'-O-methyl modified nucleotide
  source 1..21: mol_type = other RNA
taatagaatctgtgctgcgtt

SEQ ID NO: 667 - RNA, 21 nt, synthetic construct
  misc_feature 1..21: note = Synthetic
  misc_feature 1: note = Nucleotide linked to an inverted abasic cap
  modified_base 20..21: mod_base = OTHER; note = 2'-O-methyl modified nucleotide
  modified_base 20..21: mod_base = OTHER; note = phosphorothioate linkage
  misc_feature 21: note = Nucleotide linked to an inverted abasic cap
  source 1..21: mol_type = other RNA
tgttgataatccaaatggatt

SEQ ID NO: 668 - RNA, 21 nt, synthetic construct
  misc_feature 1..21: note = Synthetic
  modified_base 20..21: mod_base = OTHER; note = 2'-O-methyl modified nucleotide
  modified_base 20..21: mod_base = OTHER; note = phosphorothioate linkage
  source 1..21: mol_type = other RNA
tccatttggattatcaacatt

SEQ ID NO: 669 - DNA, 21 bp, synthetic construct
  misc_feature 1..21: note = Synthetic
  misc_feature 1..19: note = ribonucleotide unmodified or modified as described for this sequence
  misc_feature 1: note = Nucleotide linked to an inverted abasic cap
  modified_base 2..4: mod_base = OTHER; note = 2'-deoxy-2'-fluoro modified nucleotide
  modified_base 6: mod_base = OTHER; note = 2'-deoxy-2'-fluoro modified nucleotide
  modified_base 9..11: mod_base = OTHER; note = 2'-deoxy-2'-fluoro modified nucleotide
  modified_base 14: mod_base = OTHER; note = 2'-deoxy-2'-fluoro modified nucleotide
  modified_base 18: mod_base = OTHER; note = 2'-deoxy-2'-fluoro modified nucleotide
  misc_feature 21: note = Nucleotide linked to an inverted abasic cap
  source 1..21: mol_type = other DNA
  misc_feature 1: note = DNA
  misc_feature 2..4: note = RNA
  misc_feature 5: note = DNA
  misc_feature 6: note = RNA
  misc_feature 7..8: note = DNA
  misc_feature 9..11: note = RNA
  misc_feature 12..13: note = DNA
  misc_feature 14: note = RNA
  misc_feature 15..17: note = DNA
  misc_feature 18: note = RNA
  misc_feature 19..21: note = DNA
gcctgcggcccaacgggcatt

SEQ ID NO: 670 - RNA, 21 nt, synthetic construct
  misc_feature 1..21: note = Synthetic
  modified_base 4..5: mod_base = OTHER; note = 2'-deoxy-2'-fluoro modified nucleotide
  modified_base 6: mod_base = OTHER; note = 2'-O-methyl modified nucleotide
  modified_base 7..8: mod_base = OTHER; note = 2'-deoxy-2'-fluoro modified nucleotide
  modified_base 9..11: mod_base = OTHER; note = 2'-O-methyl modified nucleotide
  modified_base 12..13: mod_base = OTHER; note = 2'-deoxy-2'-fluoro modified nucleotide
  modified_base 15: mod_base = OTHER; note = 2'-deoxy-2'-fluoro modified nucleotide
  modified_base 16..18: mod_base = OTHER; note = 2'-O-methyl modified nucleotide
  modified_base 19: mod_base = OTHER; note = 2'-deoxy-2'-fluoro modified nucleotide
  modified_base 20..21: mod_base = OTHER; note = 2'-O-methyl modified nucleotide
  source 1..21: mol_type = other RNA
tgcccgttgggccgcaggctt

SEQ ID NO: 671 - DNA, 21 bp, synthetic construct
  misc_feature 1..21: note = Synthetic
  misc_feature 1..19: note = ribonucleotide unmodified or modified as described for this sequence
  misc_feature 1: note = Nucleotide linked to an inverted abasic cap
  modified_base 4: mod_base = OTHER; note = 2'-deoxy-2'-fluoro modified nucleotide
  modified_base 6..8: mod_base = OTHER; note = 2'-deoxy-2'-fluoro modified nucleotide
  modified_base 10..11: mod_base = OTHER; note = 2'-deoxy-2'-fluoro modified nucleotide
  modified_base 13..16: mod_base = OTHER; note = 2'-deoxy-2'-fluoro modified nucleotide
  modified_base 18..19: mod_base = OTHER; note = 2'-deoxy-2'-fluoro modified nucleotide
  misc_feature 21: note = Nucleotide linked to an inverted abasic cap
  source 1..21: mol_type = other DNA
  misc_feature 1..3: note = DNA
  misc_feature 4: note = RNA
  misc_feature 5: note = DNA
  misc_feature 6..8: note = RNA
  misc_feature 9: note = DNA
  misc_feature 10..11: note = RNA
  misc_feature 12: note = DNA
  misc_feature 13..16: note = RNA
  misc_feature 17: note = DNA
  misc_feature 18..19: note = RNA
  misc_feature 20..21: note = DNA
ggacattcattgcctcacttt

SEQ ID NO: 672 - RNA, 21 nt, synthetic construct
  misc_feature 1..21: note = Synthetic
  modified_base 4..7: mod_base = OTHER; note = 2'-O-methyl modified nucleotide
  modified_base 8: mod_base = OTHER; note = 2'-deoxy-2'-fluoro modified nucleotide
  modified_base 9..10: mod_base = OTHER; note = 2'-O-methyl modified nucleotide
  modified_base 11: mod_base = OTHER; note = 2'-deoxy-2'-fluoro modified nucleotide
  modified_base 12..13: mod_base = OTHER; note = 2'-O-methyl modified nucleotide
  modified_base 15: mod_base = OTHER; note = 2'-deoxy-2'-fluoro modified nucleotide
  modified_base 16: mod_base = OTHER; note = 2'-O-methyl modified nucleotide
  modified_base 17..19: mod_base = OTHER; note = 2'-deoxy-2'-fluoro modified nucleotide
  modified_base 20..21: mod_base = OTHER; note = 2'-O-methyl modified nucleotide
  source 1..21: mol_type = other RNA
agtgaggcaatgaatgtcctt

SEQ ID NO: 673 - DNA, 21 bp, synthetic construct
  misc_feature 1..21: note = Synthetic
  misc_feature 1..19: note = ribonucleotide unmodified or modified as described for this sequence
  misc_feature 1: note = Nucleotide linked to an inverted abasic cap
  modified_base 2..4: mod_base = OTHER; note = 2'-deoxy-2'-fluoro modified nucleotide
  modified_base 7..9: mod_base = OTHER; note = 2'-deoxy-2'-fluoro modified nucleotide
  modified_base 14..16: mod_base = OTHER; note = 2'-deoxy-2'-fluoro modified nucleotide
  misc_feature 21: note = Nucleotide linked to an inverted abasic cap
  source 1..21: mol_type = other DNA
  misc_feature 1: note = DNA
  misc_feature 2..4: note = RNA
  misc_feature 5..6: note = DNA
  misc_feature 7..9: note = RNA
  misc_feature 10..13: note = DNA
  misc_feature 14..16: note = RNA
  misc_feature 17..21: note = DNA
gttcggtttgaaatttgaatt

SEQ ID NO: 674 - RNA, 21 nt, synthetic construct
  misc_feature 1..21: note = Synthetic
  modified_base 4..6: mod_base = OTHER; note = 2'-O-methyl modified nucleotide
  modified_base 7..10: mod_base = OTHER; note = 2'-deoxy-2'-fluoro modified nucleotide
  modified_base 11..13: mod_base = OTHER; note = 2'-O-methyl modified nucleotide
  modified_base 14..15: mod_base = OTHER; note = 2'-deoxy-2'-fluoro modified nucleotide
  modified_base 16..18: mod_base = OTHER; note = 2'-O-methyl modified nucleotide
  modified_base 19: mod_base = OTHER; note = 2'-deoxy-2'-fluoro modified nucleotide
  modified_base 20..21: mod_base = OTHER; note = 2'-O-methyl modified nucleotide
  source 1..21: mol_type = other RNA
ttcaaatttcaaaccgaactt

SEQ ID NO: 675 - DNA, 21 bp, synthetic construct
  misc_feature 1..21: note = Synthetic
  misc_feature 1..19: note = ribonucleotide unmodified or modified as described for this sequence
  misc_feature 1: note = Nucleotide linked to an inverted abasic cap
  modified_base 2..3: mod_base = OTHER; note = 2'-deoxy-2'-fluoro modified nucleotide
  modified_base 5..6: mod_base = OTHER; note = 2'-deoxy-2'-fluoro modified nucleotide
  modified_base 8: mod_base = OTHER; note = 2'-deoxy-2'-fluoro modified nucleotide
  modified_base 11..15: mod_base = OTHER; note = 2'-deoxy-2'-fluoro modified nucleotide
  modified_base 17: mod_base = OTHER; note = 2'-deoxy-2'-fluoro modified nucleotide
  misc_feature 21: note = Nucleotide linked to an inverted abasic cap
  source 1..21: mol_type = other DNA
  misc_feature 1: note = DNA
  misc_feature 2..3: note = RNA
  misc_feature 4: note = DNA
  misc_feature 5..6: note = RNA
  misc_feature 7: note = DNA
  misc_feature 8: note = RNA
  misc_feature 9..10: note = DNA
  misc_feature 11..15: note = RNA
  misc_feature 16: note = DNA
  misc_feature 17: note = RNA
  misc_feature 18..21: note = DNA
accgtcgcaaccctcatgatt

SEQ ID NO: 676 - RNA, 21 nt, synthetic construct
  misc_feature 1..21: note = Synthetic
  modified_base 4: mod_base = OTHER; note = 2'-deoxy-2'-fluoro modified nucleotide
  modified_base 5..9: mod_base = OTHER; note = 2'-O-methyl modified nucleotide
  modified_base 10..11: mod_base = OTHER; note = 2'-deoxy-2'-fluoro modified nucleotide
  modified_base 12: mod_base = OTHER; note = 2'-O-methyl modified nucleotide
  modified_base 13: mod_base = OTHER; note = 2'-deoxy-2'-fluoro modified nucleotide
  modified_base 15: mod_base = OTHER; note = 2'-O-methyl modified nucleotide
  modified_base 16: mod_base = OTHER; note = 2'-deoxy-2'-fluoro modified nucleotide
  modified_base 17..18: mod_base = OTHER; note = 2'-O-methyl modified nucleotide
  modified_base 19: mod_base = OTHER; note = 2'-deoxy-2'-fluoro modified nucleotide
  modified_base 20..21: mod_base = OTHER; note = 2'-O-methyl modified nucleotide
  source 1..21: mol_type = other RNA
tcatgagggttgcgacggttt

SEQ ID NO: 677 - RNA, 21 nt, synthetic construct
  misc_feature 1..21: note = Synthetic
  modified_base 2: mod_base = OTHER; note = 2'-O-methyl modified nucleotide
  modified_base 4: mod_base = OTHER; note = 2'-O-methyl modified nucleotide
  modified_base 5: mod_base = OTHER; note = 2'-deoxy-2'-fluoro modified nucleotide
  modified_base 6: mod_base = OTHER; note = 2'-O-methyl modified nucleotide
  modified_base 7: mod_base = OTHER; note = 2'-deoxy-2'-fluoro modified nucleotide
  modified_base 8: mod_base = OTHER; note = 2'-O-methyl modified nucleotide
  modified_base 9..12: mod_base = OTHER; note = 2'-deoxy-2'-fluoro modified nucleotide
  modified_base 13: mod_base = OTHER; note = 2'-O-methyl modified nucleotide
  modified_base 14: mod_base = OTHER; note = 2'-deoxy-2'-fluoro modified nucleotide
  modified_base 15..16: mod_base = OTHER; note = 2'-O-methyl modified nucleotide
  modified_base 17: mod_base = OTHER; note = 2'-deoxy-2'-fluoro modified nucleotide
  modified_base 18: mod_base = OTHER; note = 2'-O-methyl modified nucleotide
  modified_base 19: mod_base = OTHER; note = 2'-deoxy-2'-fluoro modified nucleotide
  modified_base 20..21: mod_base = OTHER; note = 2'-O-methyl modified nucleotide
  source 1..21: mol_type = other RNA
attgcgtaccttgtagcattt

SEQ ID NO: 678 - DNA, 21 bp, synthetic construct
  misc_feature 1..21: note = Synthetic
  misc_feature 1..19: note = ribonucleotide unmodified or modified as described for this sequence
  misc_feature 1: note = Nucleotide linked to an inverted abasic cap
  modified_base 1: mod_base = OTHER; note = 2'-deoxy-2'-fluoro modified nucleotide
  modified_base 4: mod_base = OTHER; note = 2'-deoxy-2'-fluoro modified nucleotide
  modified_base 7..8: mod_base = OTHER; note = 2'-deoxy-2'-fluoro modified nucleotide
  modified_base 10..12: mod_base = OTHER; note = 2'-deoxy-2'-fluoro modified nucleotide
  modified_base 15: mod_base = OTHER; note = 2'-deoxy-2'-fluoro modified nucleotide
  modified_base 17..19: mod_base = OTHER; note = 2'-deoxy-2'-fluoro modified nucleotide
  misc_feature 21: note = Nucleotide linked to an inverted abasic cap
  source 1..21: mol_type = other DNA
  misc_feature 1: note = RNA
  misc_feature 2..3: note = DNA
  misc_feature 4: note = RNA
  misc_feature 5..6: note = DNA
  misc_feature 7..8: note = RNA
  misc_feature 9: note = DNA
  misc_feature 10..12: note = RNA
  misc_feature 13..14: note = DNA
  misc_feature 15: note = RNA
  misc_feature 16: note = DNA
  misc_feature 17..19: note = RNA
  misc_feature 20..21: note = DNA
caataactgtttggtattttt

SEQ ID NO: 679 - RNA, 21 nt, synthetic construct
  misc_feature 1..21: note = Synthetic
  modified_base 4: mod_base = OTHER; note = 2'-deoxy-2'-fluoro modified nucleotide
  modified_base 5: mod_base = OTHER; note = 2'-O-methyl modified nucleotide
  modified_base 6..7: mod_base = OTHER; note = 2'-deoxy-2'-fluoro modified nucleotide
  modified_base 8..10: mod_base = OTHER; note = 2'-O-methyl modified nucleotide
  modified_base 11: mod_base = OTHER; note = 2'-deoxy-2'-fluoro modified nucleotide
  modified_base 12..13: mod_base = OTHER; note = 2'-O-methyl modified nucleotide
  modified_base 14..15: mod_base = OTHER; note = 2'-deoxy-2'-fluoro modified nucleotide
  modified_base 16: mod_base = OTHER; note = 2'-O-methyl modified nucleotide
  modified_base 17..18: mod_base = OTHER; note = 2'-deoxy-2'-fluoro modified nucleotide
  modified_base 19..21: mod_base = OTHER; note = 2'-O-methyl modified nucleotide
  source 1..21: mol_type = other RNA
aaataccaaacagttattgtt

SEQ ID NO: 680 - RNA, 21 nt, synthetic construct
  misc_feature 1..21: note = Synthetic
  misc_feature 1: note = Nucleotide linked to an inverted abasic cap
  modified_base 3..4: mod_base = OTHER; note = 2'-O-methyl modified nucleotide
  modified_base 9: mod_base = OTHER; note = 2'-O-methyl modified nucleotide
  modified_base 11..12: mod_base = OTHER; note = 2'-O-methyl modified nucleotide
  modified_base 17: mod_base = OTHER; note = 2'-O-methyl modified nucleotide
  modified_base 20..21: mod_base = OTHER; note = 2'-O-methyl modified nucleotide
  modified_base 20..21: mod_base = OTHER; note = phosphorothioate linkage
  misc_feature 21: note = Nucleotide linked to an inverted abasic cap
  source 1..21: mol_type = other RNA
gactgggatgccaaggtaagt

SEQ ID NO: 681 - RNA, 23 nt, synthetic construct
  misc_feature 1..23: note = Synthetic
  modified_base 1..2: mod_base = OTHER; note = 2'-O-methyl modified nucleotide
  modified_base 6: mod_base = OTHER; note = 2'-O-methyl modified nucleotide
  modified_base 12: mod_base = OTHER; note = 2'-O-methyl modified nucleotide
  modified_base 15: mod_base = OTHER; note = 2'-O-methyl modified nucleotide
  modified_base 17: mod_base = OTHER; note = 2'-O-methyl modified nucleotide
  modified_base 22..23: mod_base = OTHER; note = 2'-O-methyl modified nucleotide
  modified_base 22..23: mod_base = OTHER; note = phosphorothioate linkage
  source 1..23: mol_type = other RNA
acttaccttggcatcccagtctt

SEQ ID NO: 682 - RNA, 21 nt, synthetic construct
  misc_feature 1..21: note = Synthetic
  misc_feature 1: note = Nucleotide linked to an inverted abasic cap
  modified_base 3..4: mod_base = OTHER; note = 2'-O-methyl modified nucleotide
  modified_base 9: mod_base = OTHER; note = 2'-O-methyl modified nucleotide
  modified_base 11..12: mod_base = OTHER; note = 2'-O-methyl modified nucleotide
  modified_base 17: mod_base = OTHER; note = 2'-O-methyl modified nucleotide
  modified_base 20..21: mod_base = OTHER; note = 2'-O-methyl modified nucleotide
  modified_base 20..21: mod_base = OTHER; note = phosphorothioate linkage
  misc_feature 21: note = Nucleotide linked to an inverted abasic cap
  source 1..21: mol_type = other RNA
gactgggatgccaaggtaatt

SEQ ID NO: 683 - RNA, 21 nt, synthetic construct
  misc_feature 1..21: note = Synthetic
  modified_base 4: mod_base = OTHER; note = 2'-O-methyl modified nucleotide
  modified_base 10: mod_base = OTHER; note = 2'-O-methyl modified nucleotide
  modified_base 13: mod_base = OTHER; note = 2'-O-methyl modified nucleotide
  modified_base 15: mod_base = OTHER; note = 2'-O-methyl modified nucleotide
  modified_base 20..21: mod_base = OTHER; note = 2'-O-methyl modified nucleotide
  modified_base 1..2: mod_base = OTHER; note = phosphorothioate linkage
  modified_base 2..3: mod_base = OTHER; note = phosphorothioate linkage
  modified_base 3..4: mod_base = OTHER; note = phosphorothioate linkage
  modified_base 20..21: mod_base = OTHER; note = phosphorothioate linkage
  source 1..21: mol_type = other RNA
ttaccttggcatcccagtctt

SEQ ID NO: 684 - RNA, 21 nt, synthetic construct
  misc_feature 1..21: note = Synthetic
  modified_base 4: mod_base = OTHER; note = 2'-O-methyl modified nucleotide
  modified_base 10: mod_base = OTHER; note = 2'-O-methyl modified nucleotide
  modified_base 13: mod_base = OTHER; note = 2'-O-methyl modified nucleotide
  modified_base 15: mod_base = OTHER; note = 2'-O-methyl modified nucleotide
  modified_base 20..21: mod_base = OTHER; note = 2'-O-methyl modified nucleotide
  modified_base 20..21: mod_base = OTHER; note = phosphorothioate linkage
  source 1..21: mol_type = other RNA
ttaccttggcatcccagtctt

SEQ ID NO: 685 - RNA, 21 nt, synthetic construct
  misc_feature 1..21: note = Synthetic
  modified_base 4..7: mod_base = OTHER; note = 2'-O-methyl modified nucleotide
  modified_base 10: mod_base = OTHER; note = 2'-O-methyl modified nucleotide
  modified_base 12..13: mod_base = OTHER; note = 2'-O-methyl modified nucleotide
  modified_base 15: mod_base = OTHER; note = 2'-O-methyl modified nucleotide
  modified_base 18..21: mod_base = OTHER; note = 2'-O-methyl modified nucleotide
  modified_base 2..3: mod_base = OTHER; note = phosphorothioate linkage
  modified_base 3..4: mod_base = OTHER; note = phosphorothioate linkage
  modified_base 20..21: mod_base = OTHER; note = phosphorothioate linkage
  source 1..21: mol_type = other RNA
ttaccttggcatcccagtctt

SEQ ID NO: 686 - RNA, 21 nt, synthetic construct
  misc_feature 1..21: note = Synthetic
  modified_base 2: mod_base = OTHER; note = 2'-O-methyl modified nucleotide
  modified_base 4..7: mod_base = OTHER; note = 2'-O-methyl modified nucleotide
  modified_base 10: mod_base = OTHER; note = 2'-O-methyl modified nucleotide
  modified_base 12..13: mod_base = OTHER; note = 2'-O-methyl modified nucleotide
  modified_base 15: mod_base = OTHER; note = 2'-O-methyl modified nucleotide
  modified_base 18..21: mod_base = OTHER; note = 2'-O-methyl modified nucleotide
  modified_base 20..21: mod_base = OTHER; note = phosphorothioate linkage
  source 1..21: mol_type = other RNA
ttaccttggcatcccagtctt

SEQ ID NO: 687 - RNA, 21 nt, synthetic construct
  misc_feature 1..21: note = Synthetic
  modified_base 4..7: mod_base = OTHER; note = 2'-O-methyl modified nucleotide
  modified_base 10: mod_base = OTHER; note = 2'-O-methyl modified nucleotide
  modified_base 12..13: mod_base = OTHER; note = 2'-O-methyl modified nucleotide
  modified_base 15: mod_base = OTHER; note = 2'-O-methyl modified nucleotide
  modified_base 18..21: mod_base = OTHER; note = 2'-O-methyl modified nucleotide
  modified_base 2..3: mod_base = OTHER; note = phosphorothioate linkage
  modified_base 20..21: mod_base = OTHER; note = phosphorothioate linkage
  source 1..21: mol_type = other RNA
ttaccttggcatcccagtctt

SEQ ID NO: 688 - RNA, 21 nt, synthetic construct
  misc_feature 1..21: note = Synthetic
  modified_base 4..7: mod_base = OTHER; note = 2'-O-methyl modified nucleotide
  modified_base 10: mod_base = OTHER; note = 2'-O-methyl modified nucleotide
  modified_base 12..13: mod_base = OTHER; note = 2'-O-methyl modified nucleotide
  modified_base 15: mod_base = OTHER; note = 2'-O-methyl modified nucleotide
  modified_base 18..21: mod_base = OTHER; note = 2'-O-methyl modified nucleotide
  modified_base 1..2: mod_base = OTHER; note = phosphorothioate linkage
  modified_base 2..3: mod_base = OTHER; note = phosphorothioate linkage
  modified_base 3..4: mod_base = OTHER; note = phosphorothioate linkage
  modified_base 20..21: mod_base = OTHER; note = phosphorothioate linkage
  source 1..21: mol_type = other RNA
ttaccttggcatcccagtctt

SEQ ID NO: 689 - RNA, 21 nt, synthetic construct
  misc_feature 1..21: note = Synthetic
  modified_base 4..7: mod_base = OTHER; note = 2'-O-methyl modified nucleotide
  modified_base 10: mod_base = OTHER; note = 2'-O-methyl modified nucleotide
  modified_base 12..13: mod_base = OTHER; note = 2'-O-methyl modified nucleotide
  modified_base 15: mod_base = OTHER; note = 2'-O-methyl modified nucleotide
  modified_base 18..21: mod_base = OTHER; note = 2'-O-methyl modified nucleotide
  modified_base 1..2: mod_base = OTHER; note = phosphorothioate linkage
  modified_base 3..4: mod_base = OTHER; note = phosphorothioate linkage
  modified_base 20..21: mod_base = OTHER; note = phosphorothioate linkage
  source 1..21: mol_type = other RNA
ttaccttggcatcccagtctt

SEQ ID NO: 690 - RNA, 21 nt, synthetic construct
  misc_feature 1..21: note = Synthetic
  modified_base 4..7: mod_base = OTHER; note = 2'-O-methyl modified nucleotide
  modified_base 10: mod_base = OTHER; note = 2'-O-methyl modified nucleotide
  modified_base 12..13: mod_base = OTHER; note = 2'-O-methyl modified nucleotide
  modified_base 15: mod_base = OTHER; note = 2'-O-methyl modified nucleotide
  modified_base 18..21: mod_base = OTHER; note = 2'-O-methyl modified nucleotide
  modified_base 1..2: mod_base = OTHER; note = phosphorothioate linkage
  modified_base 20..21: mod_base = OTHER; note = phosphorothioate linkage
  source 1..21: mol_type = other RNA
ttaccttggcatcccagtctt

SEQ ID NO: 691 - RNA, 21 nt, synthetic construct
  misc_feature 1..21: note = Synthetic
  modified_base 4..7: mod_base = OTHER; note = 2'-O-methyl modified nucleotide
  modified_base 10: mod_base = OTHER; note = 2'-O-methyl modified nucleotide
  modified_base 12..13: mod_base = OTHER; note = 2'-O-methyl modified nucleotide
  modified_base 15: mod_base = OTHER; note = 2'-O-methyl modified nucleotide
  modified_base 18..21: mod_base = OTHER; note = 2'-O-methyl modified nucleotide
  modified_base 1..2: mod_base = OTHER; note = phosphorothioate linkage
  modified_base 2..3: mod_base = OTHER; note = phosphorothioate linkage
  modified_base 20..21: mod_base = OTHER; note = phosphorothioate linkage
  source 1..21: mol_type = other RNA
ttaccttggcatcccagtctt

SEQ ID NO: 692 - RNA, 21 nt, synthetic construct
  misc_feature 1..21: note = Synthetic
  misc_feature 1: note = Nucleotide linked to an inverted abasic cap
  modified_base 5: mod_base = OTHER; note = 2'-O-methyl modified nucleotide
  modified_base 7: mod_base = OTHER; note = 2'-O-methyl modified nucleotide
  modified_base 9: mod_base = OTHER; note = 2'-O-methyl modified nucleotide
  modified_base 12: mod_base = OTHER; note = 2'-O-methyl modified nucleotide
  modified_base 15..16: mod_base = OTHER; note = 2'-O-methyl modified nucleotide
  modified_base 18..21: mod_base = OTHER; note = 2'-O-methyl modified nucleotide
  modified_base 20..21: mod_base = OTHER; note = phosphorothioate linkage
  misc_feature 21: note = Nucleotide linked to an inverted abasic cap
  source 1..21: mol_type = other RNA
aaggtacgcaataactgtttt

SEQ ID NO: 693 - RNA, 21 nt, synthetic construct
  misc_feature 1..21: note = Synthetic
  modified_base 6..7: mod_base = OTHER; note = 2'-O-methyl modified nucleotide
  modified_base 9..10: mod_base = OTHER; note = 2'-O-methyl modified nucleotide
  modified_base 12: mod_base = OTHER; note = 2'-O-methyl modified nucleotide
  modified_base 14: mod_base = OTHER; note = 2'-O-methyl modified nucleotide
  modified_base 16..21: mod_base = OTHER; note = 2'-O-methyl modified nucleotide
  modified_base 20..21: mod_base = OTHER; note = phosphorothioate linkage
  source 1..21: mol_type = other RNA
aacagttattgcgtacctttt

SEQ ID NO: 694 - RNA, 21 nt, synthetic construct
  misc_feature 1..21: note = Synthetic
  misc_feature 1: note = Nucleotide linked to an inverted abasic cap
  modified_base 20..21: mod_base = OTHER; note = 2'-O-methyl modified nucleotide
  modified_base 20..21: mod_base = OTHER; note = phosphorothioate linkage
  misc_feature 21: note = Nucleotide linked to an inverted abasic cap
  source 1..21: mol_type = other RNA
aaggtacgcaataactgtttt

SEQ ID NO: 695 - RNA, 21 nt, synthetic construct
  misc_feature 1..21: note = Synthetic
  modified_base 20..21: mod_base = OTHER; note = 2'-O-methyl modified nucleotide
  modified_base 20..21: mod_base = OTHER; note = phosphorothioate linkage
  source 1..21: mol_type = other RNA
aacagttattgcgtacctttt

SEQ ID NO: 696 - RNA, 21 nt, synthetic construct
  misc_feature 1..21: note = Synthetic
  misc_feature 1: note = Nucleotide linked to an inverted abasic cap
  modified_base 20..21: mod_base = OTHER; note = 2'-O-methyl modified nucleotide
  modified_base 20..21: mod_base = OTHER; note = phosphorothioate linkage
  misc_feature 21: note = Nucleotide linked to an inverted abasic cap
  source 1..21: mol_type = other RNA
atgctacaaggtacgcaattt

SEQ ID NO: 697 - RNA, 21 nt, synthetic construct
  misc_feature 1..21: note = Synthetic
  modified_base 20..21: mod_base = OTHER; note = 2'-O-methyl modified nucleotide
  modified_base 20..21: mod_base = OTHER; note = phosphorothioate linkage
  source 1..21: mol_type = other RNA
attgcgtaccttgtagcattt

SEQ ID NO: 698 - RNA, 21 nt, synthetic construct
  misc_feature 1..21: note = Synthetic
  misc_feature 1: note = Nucleotide linked to an inverted abasic cap
  modified_base 1..4: mod_base = OTHER; note = 2'-O-methyl modified nucleotide
  modified_base 6: mod_base = OTHER; note = 2'-O-methyl modified nucleotide
  modified_base 8: mod_base = OTHER; note = 2'-O-methyl modified nucleotide
  modified_base 10..11: mod_base = OTHER; note = 2'-O-methyl modified nucleotide
  modified_base 13..14: mod_base = OTHER; note = 2'-O-methyl modified nucleotide
  modified_base 17: mod_base = OTHER; note = 2'-O-methyl modified nucleotide
  modified_base 20..21: mod_base = OTHER; note = 2'-O-methyl modified nucleotide
  modified_base 20..21: mod_base = OTHER; note = phosphorothioate linkage
  misc_feature 21: note = Nucleotide linked to an inverted abasic cap
  source 1..21: mol_type = other RNA
aaggtacgcaataactgtttt

SEQ ID NO: 699 - RNA, 21 nt, synthetic construct
  misc_feature 1..21: note = Synthetic
  modified_base 4..5: mod_base = OTHER; note = 2'-O-methyl modified nucleotide
  modified_base 6..7: mod_base = OTHER; note = 2'-deoxy-2'-fluoro modified nucleotide
  modified_base 8: mod_base = OTHER; note = 2'-O-methyl modified nucleotide
  modified_base 9..10: mod_base = OTHER; note = 2'-deoxy-2'-fluoro modified nucleotide
  modified_base 11: mod_base = OTHER; note = 2'-O-methyl modified nucleotide
  modified_base 12: mod_base = OTHER; note = 2'-deoxy-2'-fluoro modified nucleotide
  modified_base 13: mod_base = OTHER; note = 2'-O-methyl modified nucleotide
  modified_base 14: mod_base = OTHER; note = 2'-deoxy-2'-fluoro modified nucleotide
  modified_base 15: mod_base = OTHER; note = 2'-O-methyl modified nucleotide
  modified_base 16..19: mod_base = OTHER; note = 2'-deoxy-2'-fluoro modified nucleotide
  modified_base 20..21: mod_base = OTHER; note = 2'-O-methyl modified nucleotide
  modified_base 20..21: mod_base = OTHER; note = phosphorothioate linkage
  source 1..21: mol_type = other RNA
aacagttattgcgtacctttt

SEQ ID NO: 700 - RNA, 21 nt, synthetic construct
  misc_feature 1..21: note = Synthetic
  misc_feature 1: note = Nucleotide linked to an inverted abasic cap
  modified_base 1: mod_base = OTHER; note = 2'-O-methyl modified nucleotide
  modified_base 3: mod_base = OTHER; note = 2'-O-methyl modified nucleotide
  modified_base 6: mod_base = OTHER; note = 2'-O-methyl modified nucleotide
  modified_base 8..11: mod_base = OTHER; note = 2'-O-methyl modified nucleotide
  modified_base 13: mod_base = OTHER; note = 2'-O-methyl modified nucleotide
  modified_base 15: mod_base = OTHER; note = 2'-O-methyl modified nucleotide
  modified_base 17..18: mod_base = OTHER; note = 2'-O-methyl modified nucleotide
  modified_base 20..21: mod_base = OTHER; note = 2'-O-methyl modified nucleotide
  modified_base 20..21: mod_base = OTHER; note = phosphorothioate linkage
  misc_feature 21: note = Nucleotide linked to an inverted abasic cap
  source 1..21: mol_type = other RNA
atgctacaaggtacgcaattt

SEQ ID NO: 701 - RNA, 21 nt, synthetic construct
  misc_feature 1..21: note = Synthetic
  modified_base 4: mod_base = OTHER; note = 2'-O-methyl modified nucleotide
  modified_base 5: mod_base = OTHER; note = 2'-deoxy-2'-fluoro modified nucleotide
  modified_base 6: mod_base = OTHER; note = 2'-O-methyl modified nucleotide
  modified_base 7: mod_base = OTHER; note = 2'-deoxy-2'-fluoro modified nucleotide
  modified_base 8: mod_base = OTHER; note = 2'-O-methyl modified nucleotide
  modified_base 9..12: mod_base = OTHER; note = 2'-deoxy-2'-fluoro modified nucleotide
  modified_base 13: mod_base = OTHER; note = 2'-O-methyl modified nucleotide
  modified_base 14: mod_base = OTHER; note = 2'-deoxy-2'-fluoro modified nucleotide
  modified_base 15..16: mod_base = OTHER; note = 2'-O-methyl modified nucleotide
  modified_base 17: mod_base = OTHER; note = 2'-deoxy-2'-fluoro modified nucleotide
  modified_base 18: mod_base = OTHER; note = 2'-O-methyl modified nucleotide
  modified_base 19: mod_base = OTHER; note = 2'-deoxy-2'-fluoro modified nucleotide
  modified_base 20..21: mod_base = OTHER; note = 2'-O-methyl modified nucleotide
  modified_base 20..21: mod_base = OTHER; note = phosphorothioate linkage
  source 1..21: mol_type = other RNA
attgcgtaccttgtagcattt

SEQ ID NO: 702 - DNA, 21 bp, synthetic construct
  misc_feature 1..21: note = Synthetic
  misc_feature 1..19: note = ribonucleotide unmodified or modified as described for this sequence
  misc_feature 1: note = Nucleotide linked to an inverted abasic cap
  modified_base 5: mod_base = OTHER; note = 2'-deoxy-2'-fluoro modified nucleotide
  modified_base 7: mod_base = OTHER; note = 2'-deoxy-2'-fluoro modified nucleotide
  modified_base 9: mod_base = OTHER; note = 2'-deoxy-2'-fluoro modified nucleotide
  modified_base 12: mod_base = OTHER; note = 2'-deoxy-2'-fluoro modified nucleotide
  modified_base 15..16: mod_base = OTHER; note = 2'-deoxy-2'-fluoro modified nucleotide
  modified_base 18..19: mod_base = OTHER; note = 2'-deoxy-2'-fluoro modified nucleotide
  modified_base 20..21: mod_base = OTHER; note = phosphorothioate linkage
  misc_feature 21: note = Nucleotide linked to an inverted abasic cap
  source 1..21: mol_type = other DNA
  misc_feature 1..4: note = DNA
  misc_feature 5: note = RNA
  misc_feature 6: note = DNA
  misc_feature 7: note = RNA
  misc_feature 8: note = DNA
  misc_feature 9: note = RNA
  misc_feature 10..11: note = DNA
  misc_feature 12: note = RNA
  misc_feature 13..14: note = DNA
  misc_feature 15..16: note = RNA
  misc_feature 17: note = DNA
  misc_feature 18..19: note = RNA
  misc_feature 20..21: note = DNA
aaggtacgcaataactgtttt

SEQ ID NO: 703 - DNA, 21 bp, synthetic construct
  misc_feature 1..21: note = Synthetic
  misc_feature 1..19: note = ribonucleotide unmodified or modified as described for this sequence
  misc_feature 1: note = Nucleotide linked to an inverted abasic cap
  misc_feature 21: note = Nucleotide linked to an inverted abasic cap
  source 1..21: mol_type = other DNA
  misc_feature 1..19: note = RNA
  misc_feature 20..21: note = DNA
aaggtacgcaataactgtttt

SEQ ID NO: 704 - RNA, 21 nt, synthetic construct
  misc_feature 1..21: note = Synthetic
  modified_base 20..21: mod_base = OTHER; note = 2'-O-methyl modified nucleotide
  source 1..21: mol_type = other RNA
aacagttattgcgtacctttt

SEQ ID NO: 705 - RNA, 21 nt, synthetic construct
  misc_feature 1..21: note = Synthetic
  misc_feature 1: note = Nucleotide linked to an inverted abasic cap
  modified_base 2: mod_base = OTHER; note = 2'-deoxy-2'-fluoro modified nucleotide
  modified_base 4..5: mod_base = OTHER; note = 2'-deoxy-2'-fluoro modified nucleotide
  modified_base 7: mod_base = OTHER; note = 2'-deoxy-2'-fluoro modified nucleotide
  modified_base 12: mod_base = OTHER; note = 2'-deoxy-2'-fluoro modified nucleotide
  modified_base 14: mod_base = OTHER; note = 2'-deoxy-2'-fluoro modified nucleotide
  modified_base 16: mod_base = OTHER; note = 2'-deoxy-2'-fluoro modified nucleotide
  modified_base 19: mod_base = OTHER; note = 2'-deoxy-2'-fluoro modified nucleotide
  modified_base 20..21: mod_base = OTHER; note = 2'-O-methyl modified nucleotide
  modified_base 20..21: mod_base = OTHER; note = phosphorothioate linkage
  misc_feature 21: note = Nucleotide linked to an inverted abasic cap
  source 1..21: mol_type = other RNA
atgctacaaggtacgcaattt

SEQ ID NO: 706 - RNA, 21 nt, synthetic construct
  misc_feature 1..21: note = Synthetic
  modified_base 2..3: mod_base = OTHER; note = 2'-deoxy-2'-fluoro modified nucleotide
  modified_base 5: mod_base = OTHER; note = 2'-deoxy-2'-fluoro modified nucleotide
  modified_base 7: mod_base = OTHER; note = 2'-deoxy-2'-fluoro modified nucleotide
  modified_base 9..12: mod_base = OTHER; note = 2'-deoxy-2'-fluoro modified nucleotide
  modified_base 14: mod_base = OTHER; note = 2'-deoxy-2'-fluoro modified nucleotide
  modified_base 17: mod_base = OTHER; note = 2'-deoxy-2'-fluoro modified nucleotide
  modified_base 19: mod_base = OTHER; note = 2'-deoxy-2'-fluoro modified nucleotide
  modified_base 20..21: mod_base = OTHER; note = 2'-O-methyl modified nucleotide
  modified_base 20..21: mod_base = OTHER; note = phosphorothioate linkage
  source 1..21: mol_type = other RNA
attgcgtaccttgtagcattt

SEQ ID NO: 707 - DNA, 21 bp, synthetic construct
  misc_feature 1..21: note = Synthetic
  misc_feature 1..19: note = ribonucleotide unmodified or modified as described for this sequence
  misc_feature 1: note = Nucleotide linked to an inverted abasic cap
  misc_feature 21: note = Nucleotide linked to an inverted abasic cap
  source 1..21: mol_type = other DNA
  misc_feature 1..19: note = RNA
  misc_feature 20..21: note = DNA
atgctacaaggtacgcaattt

SEQ ID NO: 708 - RNA, 21 nt, synthetic construct
  misc_feature 1..21: note = Synthetic
  modified_base 20..21: mod_base = OTHER; note = 2'-O-methyl modified nucleotide
  source 1..21: mol_type = other RNA
attgcgtaccttgtagcattt

SEQ ID NO: 709 - DNA, 21 bp, synthetic construct
  misc_feature 1..21: note = Synthetic
  misc_feature 1..19: note = ribonucleotide unmodified or modified as described for this sequence
  misc_feature 1: note = Nucleotide linked to an inverted abasic cap
  modified_base 2: mod_base = OTHER; note = 2'-deoxy-2'-fluoro modified nucleotide
  modified_base 4..5: mod_base = OTHER; note = 2'-deoxy-2'-fluoro modified nucleotide
  modified_base 7: mod_base = OTHER; note = 2'-deoxy-2'-fluoro modified nucleotide
  modified_base 12: mod_base = OTHER; note = 2'-deoxy-2'-fluoro modified nucleotide
  modified_base 14: mod_base = OTHER; note = 2'-deoxy-2'-fluoro modified nucleotide
  modified_base 16: mod_base = OTHER; note = 2'-deoxy-2'-fluoro modified nucleotide
  modified_base 19: mod_base = OTHER; note = 2'-deoxy-2'-fluoro modified nucleotide
  misc_feature 21: note = Nucleotide linked to an inverted abasic cap
  source 1..21: mol_type = other DNA
  misc_feature 1..19: note = RNA
  misc_feature 20..21: note = DNA
atgctacaaggtacgcaattt

SEQ ID NO: 710 - RNA, 21 nt, synthetic construct
  misc_feature 1..21: note = Synthetic
  modified_base 2..3: mod_base = OTHER; note = 2'-deoxy-2'-fluoro modified nucleotide
  modified_base 5: mod_base = OTHER; note = 2'-deoxy-2'-fluoro modified nucleotide
  modified_base 7: mod_base = OTHER; note = 2'-deoxy-2'-fluoro modified nucleotide
  modified_base 9..12: mod_base = OTHER; note = 2'-deoxy-2'-fluoro modified nucleotide
  modified_base 14: mod_base = OTHER; note = 2'-deoxy-2'-fluoro modified nucleotide
  modified_base 17: mod_base = OTHER; note = 2'-deoxy-2'-fluoro modified nucleotide
  modified_base 19: mod_base = OTHER; note = 2'-deoxy-2'-fluoro modified nucleotide
  modified_base 20..21: mod_base = OTHER; note = 2'-O-methyl modified nucleotide
  source 1..21: mol_type = other RNA
attgcgtaccttgtagcattt

SEQ ID NO: 711 - RNA, 21 nt, synthetic construct
  misc_feature 1..21: note = Synthetic
  misc_feature 1: note = Nucleotide linked to an inverted abasic cap
  modified_base 5: mod_base = OTHER; note = 2'-deoxy-2'-fluoro modified nucleotide
  modified_base 7: mod_base = OTHER; note = 2'-deoxy-2'-fluoro modified nucleotide
  modified_base 9: mod_base = OTHER; note = 2'-deoxy-2'-fluoro modified nucleotide
  modified_base 12: mod_base = OTHER; note = 2'-deoxy-2'-fluoro modified nucleotide
  modified_base 15..16: mod_base = OTHER; note = 2'-deoxy-2'-fluoro modified nucleotide
  modified_base 18..19: mod_base = OTHER; note = 2'-deoxy-2'-fluoro modified nucleotide
  modified_base 20..21: mod_base = OTHER; note = 2'-O-methyl modified nucleotide
  modified_base 20..21: mod_base = OTHER; note = phosphorothioate linkage
  misc_feature 21: note = Nucleotide linked to an inverted abasic cap
  source 1..21: mol_type = other RNA
aaggtacgcaataactgtttt

SEQ ID NO: 712 - RNA, 21 nt, synthetic construct
  misc_feature 1..21: note = Synthetic
  modified_base 3: mod_base = OTHER; note = 2'-deoxy-2'-fluoro modified nucleotide
  modified_base 6..7: mod_base = OTHER; note = 2'-deoxy-2'-fluoro modified nucleotide
  modified_base 9..10: mod_base = OTHER; note = 2'-deoxy-2'-fluoro modified nucleotide
  modified_base 12: mod_base = OTHER; note = 2'-deoxy-2'-fluoro modified nucleotide
  modified_base 14: mod_base = OTHER; note = 2'-deoxy-2'-fluoro modified nucleotide
  modified_base 16..19: mod_base = OTHER; note = 2'-deoxy-2'-fluoro modified nucleotide
  modified_base 20..21: mod_base = OTHER; note = 2'-O-methyl modified nucleotide
  modified_base 20..21: mod_base = OTHER; note = phosphorothioate linkage
  source 1..21: mol_type = other RNA
aacagttattgcgtacctttt

SEQ ID NO: 713 - DNA, 21 bp, synthetic construct
  misc_feature 1..21: note = Synthetic
  misc_feature 1..19: note = ribonucleotide unmodified or modified as described for this sequence
  misc_feature 1: note = Nucleotide linked to an inverted abasic cap
  modified_base 5: mod_base = OTHER; note = 2'-deoxy-2'-fluoro modified nucleotide
  modified_base 7: mod_base = OTHER; note = 2'-deoxy-2'-fluoro modified nucleotide
  modified_base 9: mod_base = OTHER; note = 2'-deoxy-2'-fluoro modified nucleotide
  modified_base 12: mod_base = OTHER; note = 2'-deoxy-2'-fluoro modified nucleotide
  modified_base 15..16: mod_base = OTHER; note = 2'-deoxy-2'-fluoro modified nucleotide
  modified_base 18..19: mod_base = OTHER; note = 2'-deoxy-2'-fluoro modified nucleotide
  misc_feature 21: note = Nucleotide linked to an inverted abasic cap
  source 1..21: mol_type = other DNA
  misc_feature 1..19: note = RNA
  misc_feature 20..21: note = DNA
aaggtacgcaataactgtttt

SEQ ID NO: 714 - RNA, 21 nt, synthetic construct
  misc_feature 1..21: note = Synthetic
  modified_base 3: mod_base = OTHER; note = 2'-deoxy-2'-fluoro modified nucleotide
  modified_base 6..7: mod_base = OTHER; note = 2'-deoxy-2'-fluoro modified nucleotide
  modified_base 9..10: mod_base = OTHER; note = 2'-deoxy-2'-fluoro modified nucleotide
  modified_base 12: mod_base = OTHER; note = 2'-deoxy-2'-fluoro modified nucleotide
  modified_base 14: mod_base = OTHER; note = 2'-deoxy-2'-fluoro modified nucleotide
  modified_base 16..19: mod_base = OTHER; note = 2'-deoxy-2'-fluoro modified nucleotide
  modified_base 20..21: mod_base = OTHER; note = 2'-O-methyl modified nucleotide
  source 1..21: mol_type = other RNA
aacagttattgcgtacctttt

SEQ ID NO: 715 - RNA, 21 nt, synthetic construct
  misc_feature 1..21: note = Synthetic
  misc_feature 1: note = Nucleotide linked to an inverted abasic cap
  modified_base 2: mod_base = OTHER; note = 2'-O-methyl modified nucleotide
  modified_base 4..5: mod_base = OTHER; note = 2'-O-methyl modified nucleotide
  modified_base 7: mod_base = OTHER; note = 2'-O-methyl modified nucleotide
  modified_base 12: mod_base = OTHER; note = 2'-O-methyl modified nucleotide
  modified_base 14: mod_base = OTHER; note = 2'-O-methyl modified nucleotide
  modified_base 16: mod_base = OTHER; note = 2'-O-methyl modified nucleotide
  modified_base 19..21: mod_base = OTHER; note = 2'-O-methyl modified nucleotide
  modified_base 20..21: mod_base = OTHER; note = phosphorothioate linkage
  misc_feature 21: note = Nucleotide linked to an inverted abasic cap
  source 1..21: mol_type = other RNA
atgctacaaggtacgcaattt

SEQ ID NO: 716 - RNA, 21 nt, synthetic construct
  misc_feature 1..21: note = Synthetic
  modified_base 5: mod_base = OTHER; note = 2'-O-methyl modified nucleotide
  modified_base 7: mod_base = OTHER; note = 2'-O-methyl modified nucleotide
  modified_base 9..12: mod_base = OTHER; note = 2'-O-methyl modified nucleotide
  modified_base 14: mod_base = OTHER; note = 2'-O-methyl modified nucleotide
  modified_base 17: mod_base = OTHER; note = 2'-O-methyl modified nucleotide
  modified_base 19..21: mod_base = OTHER; note = 2'-O-methyl modified nucleotide
  modified_base 20..21: mod_base = OTHER; note = phosphorothioate linkage
  source 1..21: mol_type = other RNA
attgcgtaccttgtagcattt

SEQ ID NO: 717 - RNA, 21 nt, synthetic construct
  misc_feature 1..21: note = Synthetic
  misc_feature 1: note = Nucleotide linked to an inverted abasic cap
  modified_base 1: mod_base = OTHER; note = 2'-O-methyl modified nucleotide
  modified_base 2: mod_base = OTHER; note = 2'-deoxy-2'-fluoro modified nucleotide
  modified_base 3: mod_base = OTHER; note = 2'-O-methyl modified nucleotide
  modified_base 4..5: mod_base = OTHER; note = 2'-deoxy-2'-fluoro modified nucleotide
  modified_base 6: mod_base = OTHER; note = 2'-O-methyl modified nucleotide
  modified_base 7: mod_base = OTHER; note = 2'-deoxy-2'-fluoro modified nucleotide
  modified_base 8..11: mod_base = OTHER; note = 2'-O-methyl modified nucleotide
  modified_base 12: mod_base = OTHER; note = 2'-deoxy-2'-fluoro modified nucleotide
  modified_base 13: mod_base = OTHER; note = 2'-O-methyl modified nucleotide
  modified_base 14: mod_base = OTHER; note = 2'-deoxy-2'-fluoro modified nucleotide
  modified_base 15: mod_base = OTHER; note = 2'-O-methyl modified nucleotide
  modified_base 16: mod_base = OTHER; note = 2'-deoxy-2'-fluoro modified nucleotide
  modified_base 17..18: mod_base = OTHER; note = 2'-O-methyl modified nucleotide
  modified_base 19: mod_base = OTHER; note = 2'-deoxy-2'-fluoro modified nucleotide
  modified_base 20..21: mod_base = OTHER; note = 2'-O-methyl modified nucleotide
  modified_base 20..21: mod_base = OTHER; note = phosphorothioate linkage
  misc_feature 21: note = Nucleotide linked to an inverted abasic cap
  source 1..21: mol_type = other RNA
atgctacaaggtacgcaattt

SEQ ID NO: 718 - DNA, 21 bp, synthetic construct
  misc_feature 1..21: note = Synthetic
  misc_feature 1..19: note = ribonucleotide unmodified or modified as described for this sequence
  misc_feature 1: note = Nucleotide linked to an inverted abasic cap
  modified_base 2: mod_base = OTHER; note = 2'-deoxy-2'-fluoro modified nucleotide
  modified_base 4..5: mod_base = OTHER; note = 2'-deoxy-2'-fluoro modified nucleotide
  modified_base 7: mod_base = OTHER; note = 2'-deoxy-2'-fluoro modified nucleotide
  modified_base 12: mod_base = OTHER; note = 2'-deoxy-2'-fluoro modified nucleotide
  modified_base 14: mod_base = OTHER; note = 2'-deoxy-2'-fluoro modified nucleotide
  modified_base 16: mod_base = OTHER; note = 2'-deoxy-2'-fluoro modified nucleotide
  modified_base 19: mod_base = OTHER; note = 2'-deoxy-2'-fluoro modified nucleotide
  modified_base 20..21: mod_base = OTHER; note = phosphorothioate linkage
  misc_feature 21: note = Nucleotide linked to an inverted abasic cap
  source 1..21: mol_type = other DNA
  misc_feature 1: note = DNA
  misc_feature 2: note = RNA
  misc_feature 3: note = DNA
  misc_feature 4..5: note = RNA
  misc_feature 6: note = DNA
  misc_feature 7: note = RNA
  misc_feature 8..11: note = DNA
  misc_feature 12: note = RNA
  misc_feature 13: note = DNA
  misc_feature 14: note = RNA
  misc_feature 15: note = DNA
  misc_feature 16: note = RNA
  misc_feature 17..18: note = DNA
  misc_feature 19: note = RNA
  misc_feature 20..21: note = DNA
atgctacaaggtacgcaattt

SEQ ID NO: 719 - RNA, 21 nt, synthetic construct
  misc_feature 1..21: note = Synthetic
  misc_feature 1: note = Nucleotide linked to an inverted abasic cap
  modified_base 1..4: mod_base = OTHER; note = 2'-O-methyl modified nucleotide
  modified_base 5: mod_base = OTHER; note = 2'-deoxy-2'-fluoro modified nucleotide
  modified_base 6: mod_base = OTHER; note = 2'-O-methyl modified nucleotide
  modified_base 7: mod_base = OTHER; note = 2'-deoxy-2'-fluoro modified nucleotide
  modified_base 8: mod_base = OTHER; note = 2'-O-methyl modified nucleotide
  modified_base 9: mod_base = OTHER; note = 2'-deoxy-2'-fluoro modified nucleotide
  modified_base 10..11: mod_base = OTHER; note = 2'-O-methyl modified nucleotide
  modified_base 12: mod_base = OTHER; note = 2'-deoxy-2'-fluoro modified nucleotide
  modified_base 13..14: mod_base = OTHER; note = 2'-O-methyl modified nucleotide
  modified_base 15..16: mod_base = OTHER; note = 2'-deoxy-2'-fluoro modified nucleotide
  modified_base 17: mod_base = OTHER; note = 2'-O-methyl modified nucleotide
  modified_base 18..19: mod_base = OTHER; note = 2'-deoxy-2'-fluoro modified nucleotide
  modified_base 20..21: mod_base = OTHER; note = 2'-O-methyl modified nucleotide
  modified_base 20..21: mod_base = OTHER; note = phosphorothioate linkage
  misc_feature 21: note = Nucleotide linked to an inverted abasic cap
  source 1..21: mol_type = other RNA
aaggtacgcaataactgtttt

SEQ ID NO: 720 - RNA, 21 nt, synthetic construct
  misc_feature 1..21: note = Synthetic
  misc_feature 1: note = Nucleotide linked to an inverted abasic cap
  modified_base 1: mod_base = OTHER; note = 2'-O-methyl modified nucleotide
  modified_base 3: mod_base = OTHER; note = 2'-O-methyl modified nucleotide
  modified_base 6: mod_base = OTHER; note = 2'-O-methyl modified nucleotide
  modified_base 8..11: mod_base = OTHER; note = 2'-O-methyl modified nucleotide
  modified_base 13: mod_base = OTHER; note = 2'-O-methyl modified nucleotide
  modified_base 15: mod_base = OTHER; note = 2'-O-methyl modified nucleotide
  modified_base 17..18: mod_base = OTHER; note = 2'-O-methyl modified nucleotide
  modified_base 20..21: mod_base = OTHER; note = 2'-O-methyl modified nucleotide
  misc_feature 21: note = Nucleotide linked to an inverted abasic cap
  source 1..21: mol_type = other RNA
atgctacaaggtacgcaattt

SEQ ID NO: 721 - RNA, 21 nt, synthetic construct
  misc_feature 1..21: note = Synthetic
  modified_base 4: mod_base = OTHER; note = 2'-O-methyl modified nucleotide
  modified_base 6: mod_base = OTHER; note = 2'-O-methyl modified nucleotide
  modified_base 8: mod_base = OTHER; note = 2'-O-methyl modified nucleotide
  modified_base 13: mod_base = OTHER; note = 2'-O-methyl modified nucleotide
  modified_base 15..16: mod_base = OTHER; note = 2'-O-methyl modified nucleotide
  modified_base 18: mod_base = OTHER; note = 2'-O-methyl modified nucleotide
  modified_base 20..21: mod_base = OTHER; note = 2'-O-methyl modified nucleotide
  source 1..21: mol_type = other RNA
attgcgtaccttgtagcattt

SEQ ID NO: 722 - RNA, 21 nt, synthetic construct
  misc_feature 1..21: note = Synthetic
  modified_base 5: mod_base = OTHER; note = 2'-O-methyl modified nucleotide
  modified_base 7: mod_base = OTHER; note = 2'-O-methyl modified nucleotide
  modified_base 9..12: mod_base = OTHER; note = 2'-O-methyl modified nucleotide
  modified_base 17: mod_base = OTHER; note = 2'-O-methyl modified nucleotide
  modified_base 19..21: mod_base = OTHER; note = 2'-O-methyl modified nucleotide
  source 1..21: mol_type = other RNA
attgcgtaccttgtagcattt

SEQ ID NO: 723 - RNA, 21 nt, synthetic construct
  misc_feature 1..21: note = Synthetic
  misc_feature 1: note = Nucleotide linked to an inverted abasic cap
  modified_base 5: mod_base = OTHER; note = 2'-O-methyl modified nucleotide
  modified_base 7: mod_base = OTHER; note = 2'-O-methyl modified nucleotide
  modified_base 9: mod_base = OTHER; note = 2'-O-methyl modified nucleotide
  modified_base 12: mod_base = OTHER; note = 2'-O-methyl modified nucleotide
  modified_base 15..16: mod_base = OTHER; note = 2'-O-methyl modified nucleotide
  modified_base 18..21: mod_base = OTHER; note = 2'-O-methyl modified nucleotide
  misc_feature 21: note = Nucleotide linked to an inverted abasic cap
  source 1..21: mol_type = other RNA
aagggacgcaagaacggggtt

SEQ ID NO: 724 - RNA, 21 nt, synthetic construct
  misc_feature 1..21: note = Synthetic
  misc_feature 1: note = Nucleotide linked to an inverted abasic cap
  modified_base 1..4: mod_base = OTHER; note = 2'-O-methyl modified nucleotide
  modified_base 5: mod_base = OTHER; note = 2'-deoxy-2'-fluoro modified nucleotide
  modified_base 6: mod_base = OTHER; note = 2'-O-methyl modified nucleotide
  modified_base 7: mod_base = OTHER; note = 2'-deoxy-2'-fluoro modified nucleotide
  modified_base 8: mod_base = OTHER; note = 2'-O-methyl modified nucleotide
  modified_base 9: mod_base = OTHER; note = 2'-deoxy-2'-fluoro modified nucleotide
  modified_base 10..11: mod_base = OTHER; note = 2'-O-methyl modified nucleotide
  modified_base 12: mod_base = OTHER; note = 2'-deoxy-2'-fluoro modified nucleotide
  modified_base 13..14: mod_base = OTHER; note = 2'-O-methyl modified nucleotide
  modified_base 15..16: mod_base = OTHER; note = 2'-deoxy-2'-fluoro modified nucleotide
  modified_base 17: mod_base = OTHER; note = 2'-O-methyl modified nucleotide
  modified_base 18..19: mod_base = OTHER; note = 2'-deoxy-2'-fluoro modified nucleotide
  modified_base 20..21: mod_base = OTHER; note = 2'-O-methyl modified nucleotide
  misc_feature 21: note = Nucleotide linked to an inverted abasic cap
  source 1..21: mol_type = other RNA
aaggtacgcaataactgtttt

SEQ ID NO: 725 - RNA, 21 nt, synthetic construct
  misc_feature 1..21: note = Synthetic
  misc_feature 1: note = Nucleotide linked to an inverted abasic cap
  modified_base 2: mod_base = OTHER; note = 2'-O-methyl modified nucleotide
  modified_base 4..5: mod_base = OTHER; note = 2'-O-methyl modified nucleotide
  modified_base 7: mod_base = OTHER; note = 2'-O-methyl modified nucleotide
  modified_base 12: mod_base = OTHER; note = 2'-O-methyl modified nucleotide
  modified_base 14: mod_base = OTHER; note = 2'-O-methyl modified nucleotide
  modified_base 16: mod_base = OTHER; note = 2'-O-methyl modified nucleotide
  modified_base 19..21: mod_base = OTHER; note = 2'-O-methyl modified nucleotide
  misc_feature 21: note = Nucleotide linked to an inverted abasic cap
  source 1..21: mol_type = other RNA
aggcgacaagggacgcaagtt

SEQ ID NO: 726 - RNA, 21 nt, synthetic construct
  misc_feature 1..21: note = Synthetic
  modified_base 4..5: mod_base = OTHER; note = 2'-deoxy-2'-fluoro modified nucleotide
  modified_base 8: mod_base = OTHER; note = 2'-deoxy-2'-fluoro modified nucleotide
  modified_base 11: mod_base = OTHER; note = 2'-deoxy-2'-fluoro modified nucleotide
  modified_base 13: mod_base = OTHER; note = 2'-deoxy-2'-fluoro modified nucleotide
  modified_base 15: mod_base = OTHER; note = 2'-deoxy-2'-fluoro modified nucleotide
  modified_base 20..21: mod_base = OTHER; note = 2'-O-methyl modified nucleotide
  source 1..21: mol_type = other RNA
aacagttattgcgtacctttt

SEQ ID NO: 727 - RNA, 21 nt, synthetic construct
  misc_feature 1..21: note = Synthetic
  misc_feature 1: note = Nucleotide linked to an inverted abasic cap
  modified_base 1: mod_base = OTHER; note = 2'-O-methyl modified nucleotide
  modified_base 2: mod_base = OTHER; note = 2'-deoxy-2'-fluoro modified nucleotide
  modified_base 3: mod_base = OTHER; note = 2'-O-methyl modified nucleotide
  modified_base 4..5: mod_base = OTHER; note = 2'-deoxy-2'-fluoro modified nucleotide
  modified_base 6: mod_base = OTHER; note = 2'-O-methyl modified nucleotide
  modified_base 7: mod_base = OTHER; note = 2'-deoxy-2'-fluoro modified nucleotide
  modified_base 8..11: mod_base = OTHER; note = 2'-O-methyl modified nucleotide
  modified_base 12: mod_base = OTHER; note = 2'-deoxy-2'-fluoro modified nucleotide
  modified_base 13: mod_base = OTHER; note = 2'-O-methyl modified nucleotide
  modified_base 14: mod_base = OTHER; note = 2'-deoxy-2'-fluoro modified nucleotide
  modified_base 15: mod_base = OTHER; note = 2'-O-methyl modified nucleotide
  modified_base 16: mod_base = OTHER; note = 2'-deoxy-2'-fluoro modified nucleotide
  modified_base 17..18: mod_base = OTHER; note = 2'-O-methyl modified nucleotide
  modified_base 19: mod_base = OTHER; note = 2'-deoxy-2'-fluoro modified nucleotide
  modified_base 20..21: mod_base = OTHER; note = 2'-O-methyl modified nucleotide
  misc_feature 21: note = Nucleotide linked to an inverted abasic cap
  source 1..21: mol_type = other RNA
atgctacaaggtacgcaattt

SEQ ID NO: 728 - RNA, 21 nt, synthetic construct
  misc_feature 1..21: note = Synthetic
  modified_base 4: mod_base = OTHER; note = 2'-deoxy-2'-fluoro modified nucleotide
  modified_base 6: mod_base = OTHER; note = 2'-deoxy-2'-fluoro modified nucleotide
  modified_base 8: mod_base = OTHER; note = 2'-deoxy-2'-fluoro modified nucleotide
  modified_base 13: mod_base = OTHER; note = 2'-deoxy-2'-fluoro modified nucleotide
  modified_base 15..16: mod_base = OTHER; note = 2'-deoxy-2'-fluoro modified nucleotide
  modified_base 18: mod_base = OTHER; note = 2'-deoxy-2'-fluoro modified nucleotide
  modified_base 20..21: mod_base = OTHER; note = 2'-O-methyl modified nucleotide
  source 1..21: mol_type = other RNA
attgcgtaccttgtagcattt

SEQ ID NO: 729 - RNA, 21 nt, synthetic construct
  misc_feature 1..21: note = Synthetic
  modified_base 4..5: mod_base = OTHER; note = 2'-O-methyl modified nucleotide
  modified_base 8: mod_base = OTHER; note = 2'-O-methyl modified nucleotide
  modified_base 11: mod_base = OTHER; note = 2'-O-methyl modified nucleotide
  modified_base 13: mod_base = OTHER; note = 2'-O-methyl modified nucleotide
  modified_base 15: mod_base = OTHER; note = 2'-O-methyl modified nucleotide
  modified_base 20..21: mod_base = OTHER; note = 2'-O-methyl modified nucleotide
  source 1..21: mol_type = other RNA
aacagttattgcgtacctttt

SEQ ID NO: 730 - DNA, 21 bp, synthetic construct
  misc_feature 1..21: note = Synthetic
  misc_feature 1: note = Nucleotide linked to an inverted abasic cap
  modified_base 2: mod_base = OTHER; note = 2'-deoxy-2'-fluoro modified nucleotide
  modified_base 4..5: mod_base = OTHER; note = 2'-deoxy-2'-fluoro modified nucleotide
  modified_base 7: mod_base = OTHER; note = 2'-deoxy-2'-fluoro modified nucleotide
  modified_base 12: mod_base = OTHER; note = 2'-deoxy-2'-fluoro modified nucleotide
  modified_base 14: mod_base = OTHER; note = 2'-deoxy-2'-fluoro modified nucleotide
  modified_base 16: mod_base = OTHER; note = 2'-deoxy-2'-fluoro modified nucleotide
  modified_base 19: mod_base = OTHER; note = 2'-deoxy-2'-fluoro modified nucleotide
  modified_base 20..21: mod_base = OTHER; note = 2'-O-methyl modified nucleotide
  misc_feature 21: note = Nucleotide linked to an inverted abasic cap
  source 1..21: mol_type = other DNA
  misc_feature 1: note = DNA
  misc_feature 2: note = RNA
  misc_feature 3: note = DNA
  misc_feature 4..5: note = RNA
  misc_feature 6: note = DNA
  misc_feature 7: note = RNA
  misc_feature 8..11: note = DNA
  misc_feature 12: note = RNA
  misc_feature 13: note = DNA
  misc_feature 14: note = RNA
  misc_feature 15: note = DNA
  misc_feature 16: note = RNA
  misc_feature 17..18: note = DNA
  misc_feature 19..21: note = RNA
atgctacaaggtacgcaattt

SEQ ID NO: 731 - RNA, 21 nt, synthetic construct
  misc_feature 1..21: note = Synthetic
  modified_base 4: mod_base = OTHER; note = 2'-deoxy-2'-fluoro modified nucleotide
  modified_base 5: mod_base = OTHER; note = 2'-O-methyl modified nucleotide
  modified_base 6: mod_base = OTHER; note = 2'-deoxy-2'-fluoro modified nucleotide
  modified_base 7: mod_base = OTHER; note = 2'-O-methyl modified nucleotide
  modified_base 8: mod_base = OTHER; note = 2'-deoxy-2'-fluoro modified nucleotide
  modified_base 9..12: mod_base = OTHER; note = 2'-O-methyl modified nucleotide
  modified_base 13: mod_base = OTHER; note = 2'-deoxy-2'-fluoro modified nucleotide
  modified_base 14: mod_base = OTHER; note = 2'-O-methyl modified nucleotide
  modified_base 15..16: mod_base = OTHER; note = 2'-deoxy-2'-fluoro modified nucleotide
  modified_base 17: mod_base = OTHER; note = 2'-O-methyl modified nucleotide
  modified_base 18: mod_base = OTHER; note = 2'-deoxy-2'-fluoro modified nucleotide
  modified_base 19..21: mod_base = OTHER; note = 2'-O-methyl modified nucleotide
  source 1..21: mol_type = other RNA
attgcgtaccttgtagcattt

SEQ ID NO: 732 - RNA, 21 nt, synthetic construct
  misc_feature 1..21: note = Synthetic
  misc_feature 1: note = Nucleotide linked to an inverted abasic cap
  modified_base 1..4: mod_base = OTHER; note = 2'-O-methyl modified nucleotide
  modified_base 6: mod_base = OTHER; note = 2'-O-methyl modified nucleotide
  modified_base 8: mod_base = OTHER; note = 2'-O-methyl modified nucleotide
  modified_base 10..11: mod_base = OTHER; note = 2'-O-methyl modified nucleotide
  modified_base 13..14: mod_base = OTHER; note = 2'-O-methyl modified nucleotide
  modified_base 17: mod_base = OTHER; note = 2'-O-methyl modified nucleotide
  modified_base 20..21: mod_base = OTHER; note = 2'-O-methyl modified nucleotide
  misc_feature 21: note = Nucleotide linked to an inverted abasic cap
  source 1..21: mol_type = other RNA
aaggtacgcaataactgtttt

SEQ ID NO: 733 - RNA, 21 nt, synthetic construct
  misc_feature 1..21: note = Synthetic
  modified_base 4..5: mod_base = OTHER; note = 2'-deoxy-2'-fluoro modified nucleotide
  modified_base 6..7: mod_base = OTHER; note = 2'-O-methyl modified nucleotide
  modified_base 8: mod_base = OTHER; note = 2'-deoxy-2'-fluoro modified nucleotide
  modified_base 9..10: mod_base = OTHER; note = 2'-O-methyl modified nucleotide
  modified_base 11: mod_base = OTHER; note = 2'-deoxy-2'-fluoro modified nucleotide
  modified_base 12: mod_base = OTHER; note = 2'-O-methyl modified nucleotide
  modified_base 13: mod_base = OTHER; note = 2'-deoxy-2'-fluoro modified nucleotide
  modified_base 14: mod_base = OTHER; note = 2'-O-methyl modified nucleotide
  modified_base 15: mod_base = OTHER; note = 2'-deoxy-2'-fluoro modified nucleotide
  modified_base 16..21: mod_base = OTHER; note = 2'-O-methyl modified nucleotide
  source 1..21: mol_type = other RNA
aacagttattgcgtacctttt

SEQ ID NO: 734 - RNA, 21 nt, synthetic construct
  misc_feature 1..21: note = Synthetic
  modified_base 6..7: mod_base = OTHER; note = 2'-O-methyl modified nucleotide
  modified_base 9..10: mod_base = OTHER; note = 2'-O-methyl modified nucleotide
  modified_base 12: mod_base = OTHER; note = 2'-O-methyl modified nucleotide
  modified_base 16..21: mod_base = OTHER; note = 2'-O-methyl modified nucleotide
  source 1..21: mol_type = other RNA
aacagttattgcgtacctttt

SEQ ID NO: 735 - DNA, 21 bp, synthetic construct
  misc_feature 1..21: note = Synthetic
  misc_feature 1: note = Nucleotide linked to an inverted abasic cap
  modified_base 5: mod_base = OTHER; note = 2'-deoxy-2'-fluoro modified nucleotide
  modified_base 7: mod_base = OTHER; note = 2'-deoxy-2'-fluoro modified nucleotide
  modified_base 9: mod_base = OTHER; note = 2'-deoxy-2'-fluoro modified nucleotide
  modified_base 12: mod_base = OTHER; note = 2'-deoxy-2'-fluoro modified nucleotide
  modified_base 15..16: mod_base = OTHER; note = 2'-deoxy-2'-fluoro modified nucleotide
  modified_base 18..19: mod_base = OTHER; note = 2'-deoxy-2'-fluoro modified nucleotide
  modified_base 20..21: mod_base = OTHER; note = 2'-O-methyl modified nucleotide
  misc_feature 21: note = Nucleotide linked to an inverted abasic cap
  source 1..21: mol_type = other DNA
  misc_feature 1..4: note = DNA
  misc_feature 5: note = RNA
  misc_feature 6: note = DNA
  misc_feature 7: note = RNA
  misc_feature 8: note = DNA
  misc_feature 9: note = RNA
  misc_feature 10..11: note = DNA
  misc_feature 12: note = RNA
  misc_feature 13..14: note = DNA
  misc_feature 15..16: note = RNA
  misc_feature 17: note = DNA
  misc_feature 18..21: note = RNA
aaggtacgcaataactgtttt

SEQ ID NO: 736 - RNA, 21 nt, synthetic construct
  misc_feature 1..21: note = Synthetic
  misc_feature 1: note = Nucleotide linked to an inverted abasic cap
  modified_base 1: mod_base = OTHER; note = 2'-O-methyl modified nucleotide
  modified_base 4..6: mod_base = OTHER; note = 2'-O-methyl modified nucleotide
  modified_base 10..11: mod_base = OTHER; note = 2'-O-methyl modified nucleotide
  modified_base 13..15: mod_base = OTHER; note = 2'-O-methyl modified nucleotide
  modified_base 20..21: mod_base = OTHER; note = 2'-O-methyl modified nucleotide
  misc_feature 21: note = Nucleotide linked to an inverted abasic cap
  source 1..21: mol_type = other RNA
gttgaactcaataaacctttt

SEQ ID NO: 737 - RNA, 21 nt, synthetic construct
  misc_feature 1..21: note = Synthetic
  misc_feature 1: note = Nucleotide linked to an inverted abasic cap
  modified_base 2..3: mod_base = OTHER; note = 2'-O-methyl modified nucleotide
  modified_base 7..9: mod_base = OTHER; note = 2'-O-methyl modified nucleotide
  modified_base 12: mod_base = OTHER; note = 2'-O-methyl modified nucleotide
  modified_base 16..21: mod_base = OTHER; note = 2'-O-methyl modified nucleotide
  misc_feature 21: note = Nucleotide linked to an inverted abasic cap
  source 1..21: mol_type = other RNA
ggggaacgcaagaaaccggtt

SEQ ID NO: 738 - RNA, 21 nt, synthetic construct
  misc_feature 1..21: note = Synthetic
  modified_base 4: mod_base = OTHER; note = 2'-deoxy-2'-fluoro modified nucleotide
  modified_base 5..7: mod_base = OTHER; note = 2'-O-methyl modified nucleotide
  modified_base 8: mod_base = OTHER; note = 2'-deoxy-2'-fluoro modified nucleotide
  modified_base 9..10: mod_base = OTHER; note = 2'-O-methyl modified nucleotide
  modified_base 11..13: mod_base = OTHER; note = 2'-deoxy-2'-fluoro modified nucleotide
  modified_base 14..16: mod_base = OTHER; note = 2'-O-methyl modified nucleotide
  modified_base 17..18: mod_base = OTHER; note = 2'-deoxy-2'-fluoro modified nucleotide
  modified_base 19..21: mod_base = OTHER; note = 2'-O-methyl modified nucleotide
  source 1..21: mol_type = other RNA
aaggtttattgagttcaactt

SEQ ID NO: 739 - RNA, 21 nt, synthetic construct
  misc_feature 1..21: note = Synthetic
  modified_base 4: mod_base = OTHER; note = 2'-O-methyl modified nucleotide
  modified_base 8: mod_base = OTHER; note = 2'-O-methyl modified nucleotide
  modified_base 11..13: mod_base = OTHER; note = 2'-O-methyl modified nucleotide
  modified_base 17..18: mod_base = OTHER; note = 2'-O-methyl modified nucleotide
  modified_base 20..21: mod_base = OTHER; note = 2'-O-methyl modified nucleotide
  source 1..21: mol_type = other RNA
aaggtttattgagttcaactt

SEQ ID NO: 740 - RNA, 21 nt, synthetic construct
  misc_feature 1..21: note = Synthetic
  misc_feature 1: note = Nucleotide linked to an inverted abasic cap
  modified_base 1: mod_base = OTHER; note = 2'-deoxy-2'-fluoro modified nucleotide
  modified_base 2: mod_base = OTHER; note = 2'-O-methyl modified nucleotide
  modified_base 3..4: mod_base = OTHER; note = 2'-deoxy-2'-fluoro modified nucleotide
  modified_base 5..6: mod_base = OTHER; note = 2'-O-methyl modified nucleotide
  modified_base 7: mod_base = OTHER; note = 2'-deoxy-2'-fluoro modified nucleotide
  modified_base 8: mod_base = OTHER; note = 2'-O-methyl modified nucleotide
  modified_base 9..10: mod_base = OTHER; note = 2'-deoxy-2'-fluoro modified nucleotide
  modified_base 11..13: mod_base = OTHER; note = 2'-O-methyl modified nucleotide
  modified_base 14..16: mod_base = OTHER; note = 2'-deoxy-2'-fluoro modified nucleotide
  modified_base 17..21: mod_base = OTHER; note = 2'-O-methyl modified nucleotide
  misc_feature 21: note = Nucleotide linked to an inverted abasic cap
  source 1..21: mol_type = other RNA
tgctgacattgaacccaaatt

SEQ ID NO: 741 - RNA, 21 nt, synthetic construct
  misc_feature 1..21: note = Synthetic
  modified_base 4..6: mod_base = OTHER; note = 2'-O-methyl modified nucleotide
  modified_base 10..11: mod_base = OTHER; note = 2'-O-methyl modified nucleotide
  modified_base 13: mod_base = OTHER; note = 2'-O-methyl modified nucleotide
  modified_base 16..17: mod_base = OTHER; note = 2'-O-methyl modified nucleotide
  modified_base 19..21: mod_base = OTHER; note = 2'-O-methyl modified nucleotide
  source 1..21: mol_type = other RNA
tttgggttcaatgtcagcatt

SEQ ID NO: 742 - RNA, 21 nt, synthetic construct
  misc_feature 1..21: note = Synthetic
  misc_feature 1: note = Nucleotide linked to an inverted abasic cap
  modified_base 2: mod_base = OTHER; note = 2'-O-methyl modified nucleotide
  modified_base 5..6: mod_base = OTHER; note = 2'-O-methyl modified nucleotide
  modified_base 8: mod_base = OTHER; note = 2'-O-methyl modified nucleotide
  modified_base 11..13: mod_base = OTHER; note = 2'-O-methyl modified nucleotide
  modified_base 17..21: mod_base = OTHER; note = 2'-O-methyl modified nucleotide
  misc_feature 21: note = Nucleotide linked to an inverted abasic cap
  source 1..21: mol_type = other RNA
tgctgacattgaacccaaatt

SEQ ID NO: 743 - RNA, 21 nt, synthetic construct
  misc_feature 1..21: note = Synthetic
  modified_base 7..9: mod_base = OTHER; note = 2'-O-methyl modified nucleotide
  modified_base 12: mod_base = OTHER; note = 2'-O-methyl modified nucleotide
  modified_base 15: mod_base = OTHER; note = 2'-O-methyl modified nucleotide
  modified_base 18: mod_base = OTHER; note = 2'-O-methyl modified nucleotide
  modified_base 20..21: mod_base = OTHER; note = 2'-O-methyl modified nucleotide
  source 1..21: mol_type = other RNA
tttgggttcaatgtcagcatt

SEQ ID NO: 744 - RNA, 21 nt, synthetic construct
  misc_feature 1..21: note = Synthetic
  misc_feature 1: note = Nucleotide linked to an inverted abasic cap
  modified_base 1..2: mod_base = OTHER; note = 2'-O-methyl modified nucleotide
  modified_base 3: mod_base = OTHER; note = 2'-deoxy-2'-fluoro modified nucleotide
  modified_base 4: mod_base = OTHER; note = 2'-O-methyl modified nucleotide
  modified_base 5..10: mod_base = OTHER; note = 2'-deoxy-2'-fluoro modified nucleotide
  modified_base 11..14: mod_base = OTHER; note = 2'-O-methyl modified nucleotide
  modified_base 15..19: mod_base = OTHER; note = 2'-deoxy-2'-fluoro modified nucleotide
  modified_base 20..21: mod_base = OTHER; note = 2'-O-methyl modified nucleotide
  misc_feature 21: note = Nucleotide linked to an inverted abasic cap
  source 1..21: mol_type = other RNA
gacgtcttctagagccttttt

SEQ ID NO: 745 - RNA, 21 nt, synthetic construct
  misc_feature 1..21: note = Synthetic
  modified_base 4..5: mod_base = OTHER; note = 2'-deoxy-2'-fluoro modified nucleotide
  modified_base 6..9: mod_base = OTHER; note = 2'-O-methyl modified nucleotide
  modified_base 10..15: mod_base = OTHER; note = 2'-deoxy-2'-fluoro modified nucleotide
  modified_base 16: mod_base = OTHER; note = 2'-O-methyl modified nucleotide
  modified_base 17: mod_base = OTHER; note = 2'-deoxy-2'-fluoro modified nucleotide
  modified_base 18..21: mod_base = OTHER; note = 2'-O-methyl modified nucleotide
  source 1..21: mol_type = other RNA
aaaggctctagaagacgtctt

SEQ ID NO: 746 - RNA, 21 nt, synthetic construct
  misc_feature 1..21: note = Synthetic
  misc_feature 1: note = Nucleotide linked to an inverted abasic cap
  modified_base 3: mod_base = OTHER; note = 2'-O-methyl modified nucleotide
  modified_base 5..10: mod_base = OTHER; note = 2'-O-methyl modified nucleotide
  modified_base 15..21: mod_base = OTHER; note = 2'-O-methyl modified nucleotide
  misc_feature 21: note = Nucleotide linked to an inverted abasic cap
  source 1..21: mol_type = other RNA
gacggcggcgagagccgggtt

SEQ ID NO: 747 - RNA, 21 nt, synthetic construct
  misc_feature 1..21: note = Synthetic
  modified_base 4..5: mod_base = OTHER; note = 2'-O-methyl modified nucleotide
  modified_base 10..13: mod_base = OTHER; note = 2'-O-methyl modified nucleotide
  modified_base 15: mod_base = OTHER; note = 2'-O-methyl modified nucleotide
  modified_base 17: mod_base = OTHER; note = 2'-O-methyl modified nucleotide
  modified_base 20..21: mod_base = OTHER; note = 2'-O-methyl modified nucleotide
  source 1..21: mol_type = other RNA
aaaggctctagaagacgtctt

SEQ ID NO: 748 - RNA, 21 nt, synthetic construct
  misc_feature 1..21: note = Synthetic
  misc_feature 1: note = Nucleotide linked to an inverted abasic cap
  modified_base 2..3: mod_base = OTHER; note = 2'-O-methyl modified nucleotide
  modified_base 5: mod_base = OTHER; note = 2'-O-methyl modified nucleotide
  modified_base 8..12: mod_base = OTHER; note = 2'-O-methyl modified nucleotide
  modified_base 14: mod_base = OTHER; note = 2'-O-methyl modified nucleotide
  modified_base 19..21: mod_base = OTHER; note = 2'-O-methyl modified nucleotide
  misc_feature 21: note = Nucleotide linked to an inverted abasic cap
  source 1..21: mol_type = other RNA
ggcgcaacccgcaggaaggtt

SEQ ID NO: 749 - RNA, 21 nt, synthetic construct
  misc_feature 1..21: note = Synthetic
  modified_base 4..5: mod_base = OTHER; note = 2'-O-methyl modified nucleotide
  modified_base 7: mod_base = OTHER; note = 2'-O-methyl modified nucleotide
  modified_base 13: mod_base = OTHER; note = 2'-O-methyl modified nucleotide
  modified_base 16: mod_base = OTHER; note = 2'-O-methyl modified nucleotide
  modified_base 19..21: mod_base = OTHER; note = 2'-O-methyl modified nucleotide
  source 1..21: mol_type = other RNA
acttcatgagggttgcgactt

SEQ ID NO: 750 - RNA, 21 nt, synthetic construct
  misc_feature 1..21: note = Synthetic
  misc_feature 1: note = Nucleotide linked to an inverted abasic cap
  modified_base 1: mod_base = OTHER; note = 2'-O-methyl modified nucleotide
  modified_base 2..3: mod_base = OTHER; note = 2'-deoxy-2'-fluoro modified nucleotide
  modified_base 4: mod_base = OTHER; note = 2'-O-methyl modified nucleotide
  modified_base 5: mod_base = OTHER; note = 2'-deoxy-2'-fluoro modified nucleotide
  modified_base 6..7: mod_base = OTHER; note = 2'-O-methyl modified nucleotide
  modified_base 8..12: mod_base = OTHER; note = 2'-deoxy-2'-fluoro modified nucleotide
  modified_base 13: mod_base = OTHER; note = 2'-O-methyl modified nucleotide
  modified_base 14: mod_base = OTHER; note = 2'-deoxy-2'-fluoro modified nucleotide
  modified_base 15..18: mod_base = OTHER; note = 2'-O-methyl modified nucleotide
  modified_base 19: mod_base = OTHER; note = 2'-deoxy-2'-fluoro modified nucleotide
  modified_base 20..21: mod_base = OTHER; note = 2'-O-methyl modified nucleotide
  misc_feature 21: note = Nucleotide linked to an inverted abasic cap
  source 1..21: mol_type = other RNA
gtcgcaaccctcatgaagttt

SEQ ID NO: 751 - RNA, 21 nt, synthetic construct
  misc_feature 1..21: note = Synthetic
  misc_feature 1: note = Nucleotide linked to an inverted abasic cap
  modified_base 1: mod_base = OTHER; note = 2'-O-methyl modified nucleotide
  modified_base 4: mod_base = OTHER; note = 2'-O-methyl modified nucleotide
  modified_base 6..7: mod_base = OTHER; note = 2'-O-methyl modified nucleotide
  modified_base 13: mod_base = OTHER; note = 2'-O-methyl modified nucleotide
  modified_base 15..18: mod_base = OTHER; note = 2'-O-methyl modified nucleotide
  modified_base 20..21: mod_base = OTHER; note = 2'-O-methyl modified nucleotide
  misc_feature 21: note = Nucleotide linked to an inverted abasic cap
  source 1..21: mol_type = other RNA
gtcgcaaccctcatgaagttt

SEQ ID NO: 752 - RNA, 21 nt, synthetic construct
  misc_feature 1..21: note = Synthetic
  modified_base 6: mod_base = OTHER; note = 2'-deoxy-2'-fluoro modified nucleotide
  modified_base 8..12: mod_base = OTHER; note = 2'-deoxy-2'-fluoro modified nucleotide
  modified_base 15: mod_base = OTHER; note = 2'-deoxy-2'-fluoro modified nucleotide
  modified_base 17..18: mod_base = OTHER; note = 2'-deoxy-2'-fluoro modified nucleotide
  modified_base 20..21: mod_base = OTHER; note = 2'-O-methyl modified nucleotide
  source 1..21: mol_type = other RNA
acttcatgagggttgcgactt

SEQ ID NO: 753 - DNA, 21 bp, synthetic construct
  misc_feature 1..21: note = Synthetic
  misc_feature 1..19: note = ribonucleotide unmodified or modified as described for this sequence
  misc_feature 1: note = Nucleotide linked to an inverted abasic cap
  misc_feature 21: note = Nucleotide linked to an inverted abasic cap
  source 1..21: mol_type = other DNA
  misc_feature 1..19: note = RNA
  misc_feature 20..21: note = DNA
gttgaactcaataaacctttt

SEQ ID NO: 754 - RNA, 21 nt, synthetic construct
  misc_feature 1..21: note = Synthetic
  modified_base 20..21: mod_base = OTHER; note = 2'-O-methyl modified nucleotide
  source 1..21: mol_type = other RNA
aaggtttattgagttcaactt

SEQ ID NO: 755 - DNA, 21 bp, synthetic construct
  misc_feature 1..21: note = Synthetic
  misc_feature 1: note = Nucleotide linked to an inverted abasic cap
  modified_base 2..3: mod_base = OTHER; note = 2'-deoxy-2'-fluoro modified nucleotide
  modified_base 7..9: mod_base = OTHER; note = 2'-deoxy-2'-fluoro modified nucleotide
  modified_base 12: mod_base = OTHER; note = 2'-deoxy-2'-fluoro modified nucleotide
  modified_base 16..19: mod_base = OTHER; note = 2'-deoxy-2'-fluoro modified nucleotide
  modified_base 20..21: mod_base = OTHER; note = 2'-O-methyl modified nucleotide
  misc_feature 21: note = Nucleotide linked to an inverted abasic cap
  source 1..21: mol_type = other DNA
  misc_feature 1: note = DNA
  misc_feature 2..3: note = RNA
  misc_feature 4..6: note = DNA
  misc_feature 7..9: note = RNA
  misc_feature 10..11: note = DNA
  misc_feature 12: note = RNA
  misc_feature 13..15: note = DNA
  misc_feature 16..21: note = RNA
gttgaactcaataaacctttt

SEQ ID NO: 756 - RNA, 21 nt, synthetic construct
  misc_feature 1..21: note = Synthetic
  modified_base 5..7: mod_base = OTHER; note = 2'-O-methyl modified nucleotide
  modified_base 9..10: mod_base = OTHER; note = 2'-O-methyl modified nucleotide
  modified_base 15..16: mod_base = OTHER; note = 2'-O-methyl modified nucleotide
  modified_base 19..21: mod_base = OTHER; note = 2'-O-methyl modified nucleotide
  source 1..21: mol_type = other RNA
aaggtttattgagttcaactt

SEQ ID NO: 757 - RNA, 21 nt, synthetic construct
  misc_feature 1..21: note = Synthetic
  modified_base 4: mod_base = OTHER; note = 2'-deoxy-2'-fluoro modified nucleotide
  modified_base 8: mod_base = OTHER; note = 2'-deoxy-2'-fluoro modified nucleotide
  modified_base 11..13: mod_base = OTHER; note = 2'-deoxy-2'-fluoro modified nucleotide
  modified_base 17..18: mod_base = OTHER; note = 2'-deoxy-2'-fluoro modified nucleotide
  modified_base 20..21: mod_base = OTHER; note = 2'-O-methyl modified nucleotide
  source 1..21: mol_type = other RNA
aaggtttattgagttcaactt

SEQ ID NO: 758 - RNA, 21 nt, synthetic construct
  misc_feature 1..21: note = Synthetic
  misc_feature 1: note = Nucleotide linked to an inverted abasic cap
  modified_base 1: mod_base = OTHER; note = 2'-O-methyl modified nucleotide
  modified_base 3..4: mod_base = OTHER; note = 2'-O-methyl modified nucleotide
  modified_base 7: mod_base = OTHER; note = 2'-O-methyl modified nucleotide
  modified_base 9..10: mod_base = OTHER; note = 2'-O-methyl modified nucleotide
  modified_base 14..16: mod_base = OTHER; note = 2'-O-methyl modified nucleotide
  modified_base 20..21: mod_base = OTHER; note = 2'-O-methyl modified nucleotide
  misc_feature 21: note = Nucleotide linked to an inverted abasic cap
  source 1..21: mol_type = other RNA
ggcggacagggaacccaaatt

SEQ ID NO: 759 - RNA, 21 nt, synthetic construct
  misc_feature 1..21: note = Synthetic
  modified_base 4..6: mod_base = OTHER; note = 2'-deoxy-2'-fluoro modified nucleotide
  modified_base 7..9: mod_base = OTHER; note = 2'-O-methyl modified nucleotide
  modified_base 10..11: mod_base = OTHER; note = 2'-deoxy-2'-fluoro modified nucleotide
  modified_base 12: mod_base = OTHER; note = 2'-O-methyl modified nucleotide
  modified_base 13: mod_base = OTHER; note = 2'-deoxy-2'-fluoro modified nucleotide
  modified_base 14..15: mod_base = OTHER; note = 2'-O-methyl modified nucleotide
  modified_base 16..17: mod_base = OTHER; note = 2'-deoxy-2'-fluoro modified nucleotide
  modified_base 18: mod_base = OTHER; note = 2'-O-methyl modified nucleotide
  modified_base 19: mod_base = OTHER; note = 2'-deoxy-2'-fluoro modified nucleotide
  modified_base 20..21: mod_base = OTHER; note = 2'-O-methyl modified nucleotide
  source 1..21: mol_type = other RNA
tttgggttcaatgtcagcatt

SEQ ID NO: 760 - RNA, 21 nt, synthetic construct
  misc_feature 1..21: note = Synthetic
  modified_base 4..6: mod_base = OTHER; note = 2'-deoxy-2'-fluoro modified nucleotide
  modified_base 10..11: mod_base = OTHER; note = 2'-deoxy-2'-fluoro modified nucleotide
  modified_base 13: mod_base = OTHER; note = 2'-deoxy-2'-fluoro modified nucleotide
  modified_base 16..17: mod_base = OTHER; note = 2'-deoxy-2'-fluoro modified nucleotide
  modified_base 19: mod_base = OTHER; note = 2'-deoxy-2'-fluoro modified nucleotide
  modified_base 20..21: mod_base = OTHER; note = 2'-O-methyl modified nucleotide
  source 1..21: mol_type = other RNA
tttgggttcaatgtcagcatt

SEQ ID NO: 761 - RNA, 21 nt, synthetic construct
  misc_feature 1..21: note = Synthetic
  modified_base 6..9: mod_base = OTHER; note = 2'-deoxy-2'-fluoro modified nucleotide
  modified_base 16: mod_base = OTHER; note = 2'-deoxy-2'-fluoro modified nucleotide
  modified_base 18..19: mod_base = OTHER; note = 2'-deoxy-2'-fluoro modified nucleotide
  modified_base 20..21: mod_base = OTHER; note = 2'-O-methyl modified nucleotide
  source 1..21: mol_type = other RNA
aaaggctctagaagacgtctt

SEQ ID NO: 762 - RNA, 21 nt, synthetic construct
  misc_feature 1..21: note = Synthetic
  misc_feature 1: note = Nucleotide linked to an inverted abasic cap
  modified_base 1..2: mod_base = OTHER; note = 2'-O-methyl modified nucleotide
  modified_base 4: mod_base = OTHER; note = 2'-O-methyl modified nucleotide
  modified_base 11..14: mod_base = OTHER; note = 2'-O-methyl modified nucleotide
  modified_base 20..21: mod_base = OTHER; note = 2'-O-methyl modified nucleotide
  misc_feature 21: note = Nucleotide linked to an inverted abasic cap
  source 1..21: mol_type = other RNA
gacgtcttctagagccttttt

SEQ ID NO: 763 - RNA, 21 nt, synthetic construct
  misc_feature 1..21: note = Synthetic
  modified_base 6..9: mod_base = OTHER; note = 2'-O-methyl modified nucleotide
  modified_base 16: mod_base = OTHER; note = 2'-O-methyl modified nucleotide
  modified_base 18..21: mod_base = OTHER; note = 2'-O-methyl modified nucleotide
  source 1..21: mol_type = other RNA
aaaggctctagaagacgtctt

SEQ ID NO: 764 - RNA, 21 nt, synthetic construct
  misc_feature 1..21: note = Synthetic
  modified_base 4..5: mod_base = OTHER; note = 2'-O-methyl modified nucleotide
  modified_base 6: mod_base = OTHER; note = 2'-deoxy-2'-fluoro modified nucleotide
  modified_base 7: mod_base = OTHER; note = 2'-O-methyl modified nucleotide
  modified_base 8..12: mod_base = OTHER; note = 2'-deoxy-2'-fluoro modified nucleotide
  modified_base 13..14: mod_base = OTHER; note = 2'-O-methyl modified nucleotide
  modified_base 15: mod_base = OTHER; note = 2'-deoxy-2'-fluoro modified nucleotide
  modified_base 16: mod_base = OTHER; note = 2'-O-methyl modified nucleotide
  modified_base 17..18: mod_base = OTHER; note = 2'-deoxy-2'-fluoro modified nucleotide
  modified_base 19..21: mod_base = OTHER; note = 2'-O-methyl modified nucleotide
  source 1..21: mol_type = other RNA
acttcatgagggttgcgactt

SEQ ID NO: 765 - RNA, 21 nt, synthetic construct
  misc_feature 1..21: note = Synthetic
  misc_feature 1: note = Nucleotide linked to an inverted abasic cap
  modified_base 1: mod_base = OTHER; note = 2'-O-methyl modified nucleotide
  modified_base 2..3: mod_base = OTHER; note = 2'-deoxy-2'-fluoro modified nucleotide
  modified_base 4..6: mod_base = OTHER; note = 2'-O-methyl modified nucleotide
  modified_base 7..9: mod_base = OTHER; note = 2'-deoxy-2'-fluoro modified nucleotide
  modified_base 10..11: mod_base = OTHER; note = 2'-O-methyl modified nucleotide
  modified_base 12: mod_base = OTHER; note = 2'-deoxy-2'-fluoro modified nucleotide
  modified_base 13..15: mod_base = OTHER; note = 2'-O-methyl modified nucleotide
  modified_base 16..19: mod_base = OTHER; note = 2'-deoxy-2'-fluoro modified nucleotide
  modified_base 20..21: mod_base = OTHER; note = 2'-O-methyl modified nucleotide
  misc_feature 21: note = Nucleotide linked to an inverted abasic cap
  source 1..21: mol_type = other RNA
gttgaactcaataaacctttt

SEQ ID NO: 766 - RNA, 21 nt, synthetic construct
  misc_feature 1..21: note = Synthetic
  modified_base 5..7: mod_base = OTHER; note = 2'-deoxy-2'-fluoro modified nucleotide
  modified_base 9..10: mod_base = OTHER; note = 2'-deoxy-2'-fluoro modified nucleotide
  modified_base 14..16: mod_base = OTHER; note = 2'-deoxy-2'-fluoro modified nucleotide
  modified_base 19: mod_base = OTHER; note = 2'-deoxy-2'-fluoro modified nucleotide
  modified_base 20..21: mod_base = OTHER; note = 2'-O-methyl modified nucleotide
  source 1..21: mol_type = other RNA
aaggtttattgagttcaactt

SEQ ID NO: 767 - RNA, 21 nt, synthetic construct
  misc_feature 1..21: note = Synthetic
  modified_base 1..3: mod_base = OTHER; note = 2'-deoxy-2'-fluoro modified nucleotide
  modified_base 7..9: mod_base = OTHER; note = 2'-deoxy-2'-fluoro modified nucleotide
  modified_base 12: mod_base = OTHER; note = 2'-deoxy-2'-fluoro modified nucleotide
  modified_base 14..15: mod_base = OTHER; note = 2'-deoxy-2'-fluoro modified nucleotide
  modified_base 18: mod_base = OTHER; note = 2'-deoxy-2'-fluoro modified nucleotide
  modified_base 20..21: mod_base = OTHER; note = 2'-O-methyl modified nucleotide
  source 1..21: mol_type = other RNA
tttgggttcaatgtcagcatt

SEQ ID NO: 768 - DNA, 21 bp, synthetic construct
  misc_feature 1..21: note = Synthetic
  misc_feature 1..19: note = ribonucleotide unmodified or modified as described for this sequence
  misc_feature 1: note = Nucleotide linked to an inverted abasic cap
  modified_base 1: mod_base = OTHER; note = 2'-deoxy-2'-fluoro modified nucleotide
  modified_base 3..4: mod_base = OTHER; note = 2'-deoxy-2'-fluoro modified nucleotide
  modified_base 7: mod_base = OTHER; note = 2'-deoxy-2'-fluoro modified nucleotide
  modified_base 9..10: mod_base = OTHER; note = 2'-deoxy-2'-fluoro modified nucleotide
  modified_base 14..16: mod_base = OTHER; note = 2'-deoxy-2'-fluoro modified nucleotide
  misc_feature 21: note = Nucleotide linked to an inverted abasic cap
  source 1..21: mol_type = other DNA
  misc_feature 1..19: note = RNA
  misc_feature 20..21: note = DNA
tgctgacattgaacccaaatt

SEQ ID NO: 769 - DNA, 21 bp, synthetic construct
  misc_feature 1..21: note = Synthetic
  misc_feature 1..19: note = ribonucleotide unmodified or modified as described for this sequence
  misc_feature 1: note = Nucleotide linked to an inverted abasic cap
  misc_feature 21: note = Nucleotide linked to an inverted abasic cap
  source 1..21: mol_type = other DNA
  misc_feature 1..19: note = RNA
  misc_feature 20..21: note = DNA
gacgtcttctagagccttttt

SEQ ID NO: 770 - RNA, 21 nt, synthetic construct
  misc_feature 1..21: note = Synthetic
  modified_base 20..21: mod_base = OTHER; note = 2'-O-methyl modified nucleotide
  source 1..21: mol_type = other RNA
aaaggctctagaagacgtctt

SEQ ID NO: 771 - RNA, 21 nt, synthetic construct
  misc_feature 1..21: note = Synthetic
  modified_base 6: mod_base = OTHER; note = 2'-O-methyl modified nucleotide
  modified_base 8..12: mod_base = OTHER; note = 2'-O-methyl modified nucleotide
  modified_base 15: mod_base = OTHER; note = 2'-O-methyl modified nucleotide
  modified_base 17..18: mod_base = OTHER; note = 2'-O-methyl modified nucleotide
  modified_base 20..21: mod_base = OTHER; note = 2'-O-methyl modified nucleotide
  source 1..21: mol_type = other RNA
acttcatgagggttgcgactt

SEQ ID NO: 772 - DNA, 21 bp, synthetic construct
  misc_feature 1..21: note = Synthetic
  misc_feature 1: note = Nucleotide linked to an inverted abasic cap
  modified_base 2..3: mod_base = OTHER; note = 2'-deoxy-2'-fluoro modified nucleotide
  modified_base 5: mod_base = OTHER; note = 2'-deoxy-2'-fluoro modified nucleotide
  modified_base 8..12: mod_base = OTHER; note = 2'-deoxy-2'-fluoro modified nucleotide
  modified_base 14: mod_base = OTHER; note = 2'-deoxy-2'-fluoro modified nucleotide
  modified_base 19: mod_base = OTHER; note = 2'-deoxy-2'-fluoro modified nucleotide
  modified_base 20..21: mod_base = OTHER; note = 2'-O-methyl modified nucleotide
  misc_feature 21: note = Nucleotide linked to an inverted abasic cap
  source 1..21: mol_type = other DNA
  misc_feature 1: note = DNA
  misc_feature 2..3: note = RNA
  misc_feature 4: note = DNA
  misc_feature 5: note = RNA
  misc_feature 6..7: note = DNA
  misc_feature 8..12: note = RNA
  misc_feature 13: note = DNA
  misc_feature 14: note = RNA
  misc_feature 15..18: note = DNA
  misc_feature 19..21: note = RNA
gtcgcaaccctcatgaagttt

SEQ ID NO: 773 - RNA, 21 nt, synthetic construct
  misc_feature 1..21: note = Synthetic
  modified_base 2..5: mod_base = OTHER; note = 2'-deoxy-2'-fluoro modified nucleotide
  modified_base 7: mod_base = OTHER; note = 2'-deoxy-2'-fluoro modified nucleotide
  modified_base 13..14: mod_base = OTHER; note = 2'-deoxy-2'-fluoro modified nucleotide
  modified_base 16: mod_base = OTHER; note = 2'-deoxy-2'-fluoro modified nucleotide
  modified_base 19: mod_base = OTHER; note = 2'-deoxy-2'-fluoro modified nucleotide
  modified_base 20..21: mod_base = OTHER; note = 2'-O-methyl modified nucleotide
  source 1..21: mol_type = other RNA
acttcatgagggttgcgactt

SEQ ID NO: 774 - DNA, 21 bp, synthetic construct
  misc_feature 1..21: note = Synthetic
  misc_feature 1..19: note = ribonucleotide unmodified or modified as described for this sequence
  misc_feature 1: note = Nucleotide linked to an inverted abasic cap
  misc_feature 21: note = Nucleotide linked to an inverted abasic cap
  source 1..21: mol_type = other DNA
  misc_feature 1..19: note = RNA
  misc_feature 20..21: note = DNA
gtcgcaaccctcatgaagttt

SEQ ID NO: 775 - RNA, 21 nt, synthetic construct
  misc_feature 1..21: note = Synthetic
  modified_base 20..21: mod_base = OTHER; note = 2'-O-methyl modified nucleotide
  source 1..21: mol_type = other RNA
acttcatgagggttgcgactt

SEQ ID NO: 776 - DNA, 21 bp, synthetic construct
  misc_feature 1..21: note = Synthetic
  misc_feature 1..19: note = ribonucleotide unmodified or modified as described for this sequence
  misc_feature 1: note = Nucleotide linked to an inverted abasic cap
  modified_base 2..3: mod_base = OTHER; note = 2'-deoxy-2'-fluoro modified nucleotide
  modified_base 7..9: mod_base = OTHER; note = 2'-deoxy-2'-fluoro modified nucleotide
  modified_base 12: mod_base = OTHER; note = 2'-deoxy-2'-fluoro modified nucleotide
  modified_base 16..19: mod_base = OTHER; note = 2'-deoxy-2'-fluoro modified nucleotide
  misc_feature 21: note = Nucleotide linked to an inverted abasic cap
  source 1..21: mol_type = other DNA
  misc_feature 1..19: note = RNA
  misc_feature 20..21: note = DNA
gttgaactcaataaacctttt

SEQ ID NO: 777 - DNA, 21 bp, synthetic construct
  misc_feature 1..21: note = Synthetic
  misc_feature 1..19: note = ribonucleotide unmodified or modified as described for this sequence
  misc_feature 1: note = Nucleotide linked to an inverted abasic cap
  misc_feature 21: note = Nucleotide linked to an inverted abasic cap
  source 1..21: mol_type = other DNA
  misc_feature 1..19: note = RNA
  misc_feature 20..21: note = DNA
tgctgacattgaacccaaatt

SEQ ID NO: 778 - RNA, 21 nt, synthetic construct
  misc_feature 1..21: note = Synthetic
  modified_base 20..21: mod_base = OTHER; note = 2'-O-methyl modified nucleotide
  source 1..21: mol_type = other RNA
tttgggttcaatgtcagcatt

SEQ ID NO: 779 - DNA, 21 bp, synthetic construct
  misc_feature 1..21: note = Synthetic
  misc_feature 1..19: note = ribonucleotide unmodified or modified as described for this sequence
  misc_feature 1: note = Nucleotide linked to an inverted abasic cap
  modified_base 3: mod_base = OTHER; note = 2'-deoxy-2'-fluoro modified nucleotide
  modified_base 5..10: mod_base = OTHER; note = 2'-deoxy-2'-fluoro modified nucleotide
  modified_base 15..19: mod_base = OTHER; note = 2'-deoxy-2'-fluoro modified nucleotide
  misc_feature 21: note = Nucleotide linked to an inverted abasic cap
  source 1..21: mol_type = other DNA
  misc_feature 1..19: note = RNA
  misc_feature 20..21: note = DNA
gacgtcttctagagccttttt

SEQ ID NO: 780 - RNA, 21 nt, synthetic construct
  misc_feature 1..21: note = Synthetic
  modified_base 4..5: mod_base = OTHER; note = 2'-deoxy-2'-fluoro modified nucleotide
  modified_base 10..15: mod_base = OTHER; note = 2'-deoxy-2'-fluoro modified nucleotide
  modified_base 17: mod_base = OTHER; note = 2'-deoxy-2'-fluoro modified nucleotide
  modified_base 20..21: mod_base = OTHER; note = 2'-O-methyl modified nucleotide
  source 1..21: mol_type = other RNA
aaaggctctagaagacgtctt

SEQ ID NO: 781 - DNA, 21 bp, synthetic construct
  misc_feature 1..21: note = Synthetic
  misc_feature 1: note = Nucleotide linked to an inverted abasic cap
  modified_base 1: mod_base = OTHER; note = 2'-deoxy-2'-fluoro modified nucleotide
  modified_base 3..4: mod_base = OTHER; note = 2'-deoxy-2'-fluoro modified nucleotide
  modified_base 7: mod_base = OTHER; note = 2'-deoxy-2'-fluoro modified nucleotide
  modified_base 9..10: mod_base = OTHER; note = 2'-deoxy-2'-fluoro modified nucleotide
  modified_base 14..16: mod_base = OTHER; note = 2'-deoxy-2'-fluoro modified nucleotide
  modified_base 20..21: mod_base = OTHER; note = 2'-O-methyl modified nucleotide
  misc_feature 21: note = Nucleotide linked to an inverted abasic cap
  source 1..21: mol_type = other DNA
  misc_feature 1: note = RNA
  misc_feature 2: note = DNA
  misc_feature 3..4: note = RNA
  misc_feature 5..6: note = DNA
  misc_feature 7: note = RNA
  misc_feature 8: note = DNA
  misc_feature 9..10: note = RNA
  misc_feature 11..13: note = DNA
  misc_feature 14..16: note = RNA
  misc_feature 17..19: note = DNA
  misc_feature 20..21: note = RNA
tgctgacattgaacccaaatt

SEQ ID NO: 782 - DNA, 21 bp, synthetic construct
  misc_feature 1..21: note = Synthetic
  misc_feature 1: note = Nucleotide linked to an inverted abasic cap
  modified_base 3: mod_base = OTHER; note = 2'-deoxy-2'-fluoro modified nucleotide
  modified_base 5..10: mod_base = OTHER; note = 2'-deoxy-2'-fluoro modified nucleotide
  modified_base 15..19: mod_base = OTHER; note = 2'-deoxy-2'-fluoro modified nucleotide
  modified_base 20..21: mod_base = OTHER; note = 2'-O-methyl modified nucleotide
  misc_feature 21: note = Nucleotide linked to an inverted abasic cap
  source 1..21: mol_type = other DNA
  misc_feature 1..2: note = DNA
  misc_feature 3: note = RNA
  misc_feature 4: note = DNA
  misc_feature 5..10: note = RNA
  misc_feature 11..14: note = DNA
  misc_feature 15..21: note = RNA
gacgtcttctagagccttttt

SEQ ID NO: 783 - DNA, 21 bp, synthetic construct
  misc_feature 1..21: note = Synthetic
  misc_feature 1..19: note = ribonucleotide unmodified or modified as described for this sequence
  misc_feature 1: note = Nucleotide linked to an inverted abasic cap
  modified_base 2..3: mod_base = OTHER; note = 2'-deoxy-2'-fluoro modified nucleotide
  modified_base 5: mod_base = OTHER; note = 2'-deoxy-2'-fluoro modified nucleotide
  modified_base 8..12: mod_base = OTHER; note = 2'-deoxy-2'-fluoro modified nucleotide
  modified_base 14: mod_base = OTHER; note = 2'-deoxy-2'-fluoro modified nucleotide
  modified_base 19: mod_base = OTHER; note = 2'-deoxy-2'-fluoro modified nucleotide
  misc_feature 21: note = Nucleotide linked to an inverted abasic cap
  source 1..21: mol_type = other DNA
  misc_feature 1..19: note = RNA
  misc_feature 20..21: note = DNA
gtcgcaaccctcatgaagttt

SEQ ID NO: 784 - RNA, 21 nt, synthetic construct
  misc_feature 1..21: note = Synthetic
  misc_feature 1: note = Nucleotide linked to an inverted abasic cap
  modified_base 2: mod_base = OTHER; note = 2'-O-methyl modified nucleotide
  modified_base 4..5: mod_base = OTHER; note = 2'-O-methyl modified nucleotide
  modified_base 7: mod_base = OTHER; note = 2'-O-methyl modified nucleotide
  modified_base 12: mod_base = OTHER; note = 2'-O-methyl modified nucleotide
  modified_base 14: mod_base = OTHER; note = 2'-O-methyl modified nucleotide
  modified_base 16: mod_base = OTHER; note = 2'-O-methyl modified nucleotide
  modified_base 19..21: mod_base = OTHER; note = 2'-O-methyl modified nucleotide
  misc_feature 21: note = Nucleotide linked to an inverted abasic cap
  source 1..21: mol_type = other RNA
atgctacaaggtacgcaattt

SEQ ID NO: 785 - RNA, 21 nt, synthetic construct
  misc_feature 1..21: note = Synthetic
  misc_feature 1: note = Nucleotide linked to an inverted abasic cap
  modified_base 5: mod_base = OTHER; note = 2'-O-methyl modified nucleotide
  modified_base 7: mod_base = OTHER; note = 2'-O-methyl modified nucleotide
  modified_base 9: mod_base = OTHER; note = 2'-O-methyl modified nucleotide
  modified_base 12: mod_base = OTHER; note = 2'-O-methyl modified nucleotide
  modified_base 15..16: mod_base = OTHER; note = 2'-O-methyl modified nucleotide
  modified_base 18..21: mod_base = OTHER; note = 2'-O-methyl modified nucleotide
  misc_feature 21: note = Nucleotide linked to an inverted abasic cap
  source 1..21: mol_type = other RNA
aaggtacgcaataactgtttt

SEQ ID NO: 786 - RNA, 21 nt, synthetic construct
  misc_feature 1..21: note = Synthetic
  misc_feature 1: note = Nucleotide linked to an inverted abasic cap
  modified_base 2..3: mod_base = OTHER; note = 2'-O-methyl modified nucleotide
  modified_base 5: mod_base = OTHER; note = 2'-O-methyl modified nucleotide
  modified_base 8..12: mod_base = OTHER; note = 2'-O-methyl modified nucleotide
  modified_base 14: mod_base = OTHER; note = 2'-O-methyl modified nucleotide
  modified_base 19..21: mod_base = OTHER; note = 2'-O-methyl modified nucleotide
  misc_feature 21: note = Nucleotide linked to an inverted abasic cap
  source 1..21: mol_type = other RNA
gtcgcaaccctcatgaagttt

SEQ ID NO: 787 - RNA, 21 nt, synthetic construct
  misc_feature 1..21: note = Synthetic
  misc_feature 1: note = Nucleotide linked to an inverted abasic cap
  modified_base 2..3: mod_base = OTHER; note = 2'-O-methyl modified nucleotide
  modified_base 7..9: mod_base = OTHER; note = 2'-O-methyl modified nucleotide
  modified_base 12: mod_base = OTHER; note = 2'-O-methyl modified nucleotide
  modified_base 16..21: mod_base = OTHER; note = 2'-O-methyl modified nucleotide
  misc_feature 21: note = Nucleotide linked to an inverted abasic cap
  source 1..21: mol_type = other RNA
gttgaactcaataaacctttt

SEQ ID NO: 788 - RNA, 21 nt, synthetic construct
  misc_feature 1..21: note = Synthetic
  misc_feature 1: note = Nucleotide linked to an inverted abasic cap
  modified_base 1: mod_base = OTHER; note = 2'-O-methyl modified nucleotide
  modified_base 3..4: mod_base = OTHER; note = 2'-O-methyl modified nucleotide
  modified_base 7: mod_base = OTHER; note = 2'-O-methyl modified nucleotide
  modified_base 9..10: mod_base = OTHER; note = 2'-O-methyl modified nucleotide
  modified_base 14..16: mod_base = OTHER; note = 2'-O-methyl modified nucleotide
  modified_base 20..21: mod_base = OTHER; note = 2'-O-methyl modified nucleotide
  misc_feature 21: note = Nucleotide linked to an inverted abasic cap
  source 1..21: mol_type = other RNA
tgctgacattgaacccaaatt

SEQ ID NO: 789 - RNA, 21 nt, synthetic construct
  misc_feature 1..21: note = Synthetic
  misc_feature 1: note = Nucleotide linked to an inverted abasic cap
  modified_base 3: mod_base = OTHER; note = 2'-O-methyl modified nucleotide
  modified_base 5..10: mod_base = OTHER; note = 2'-O-methyl modified nucleotide
  modified_base 15..21: mod_base = OTHER; note = 2'-O-methyl modified nucleotide
  misc_feature 21: note = Nucleotide linked to an inverted abasic cap
  source 1..21: mol_type = other RNA
gacgtcttctagagccttttt

SEQ ID NO: 790 - RNA, 21 nt, synthetic construct
  misc_feature 1..21: note = Synthetic
  misc_feature 1: note = Nucleotide linked to an inverted abasic cap
  modified_base 3: mod_base = OTHER; note = 2'-O-methyl modified nucleotide
  modified_base 10: mod_base = OTHER; note = 2'-O-methyl modified nucleotide
  modified_base 12: mod_base = OTHER; note = 2'-O-methyl modified nucleotide
  modified_base 14: mod_base = OTHER; note = 2'-O-methyl modified nucleotide
  modified_base 17: mod_base = OTHER; note = 2'-O-methyl modified nucleotide
  modified_base 19..21: mod_base = OTHER; note = 2'-O-methyl modified nucleotide
  misc_feature 21: note = Nucleotide linked to an inverted abasic cap
  source 1..21: mol_type = other RNA
gatggaagatgtgtgacattt

SEQ ID NO: 791 - RNA, 21 nt, synthetic construct
  misc_feature 1..21: note = Synthetic
  misc_feature 1: note = Nucleotide linked to an inverted abasic cap
  modified_base 1..2: mod_base = OTHER; note = 2'-O-methyl modified nucleotide
  modified_base 3: mod_base = OTHER; note = 2'-deoxy-2'-fluoro modified nucleotide
  modified_base 4..9: mod_base = OTHER; note = 2'-O-methyl modified nucleotide
  modified_base 10: mod_base = OTHER; note = 2'-deoxy-2'-fluoro modified nucleotide
  modified_base 11: mod_base = OTHER; note = 2'-O-methyl modified nucleotide
  modified_base 12: mod_base = OTHER; note = 2'-deoxy-2'-fluoro modified nucleotide
  modified_base 13: mod_base = OTHER; note = 2'-O-methyl modified nucleotide
  modified_base 14: mod_base = OTHER; note = 2'-deoxy-2'-fluoro modified nucleotide
  modified_base 15..16: mod_base = OTHER; note = 2'-O-methyl modified nucleotide
  modified_base 17: mod_base = OTHER; note = 2'-deoxy-2'-fluoro modified nucleotide
  modified_base 18: mod_base = OTHER; note = 2'-O-methyl modified nucleotide
  modified_base 19: mod_base = OTHER; note = 2'-deoxy-2'-fluoro modified nucleotide
  modified_base 20..21: mod_base = OTHER; note = 2'-O-methyl modified nucleotide
  misc_feature 21: note = Nucleotide linked to an inverted abasic cap
  source 1..21: mol_type = other RNA
gatggaagatgtgtgacattt

SEQ ID NO: 792 - RNA, 21 nt, synthetic construct
  misc_feature 1..21: note = Synthetic
  modified_base 4..5: mod_base = OTHER; note = 2'-O-methyl modified nucleotide
  modified_base 7: mod_base = OTHER; note = 2'-O-methyl modified nucleotide
  modified_base 9: mod_base = OTHER; note = 2'-O-methyl modified nucleotide
  modified_base 11..13: mod_base = OTHER; note = 2'-O-methyl modified nucleotide
  modified_base 15..16: mod_base = OTHER; note = 2'-O-methyl modified nucleotide
  modified_base 18..21: mod_base = OTHER; note = 2'-O-methyl modified nucleotide
  source 1..21: mol_type = other RNA
atgtcacacatcttccatctt

SEQ ID NO: 793 - RNA, 21 nt, synthetic construct
  misc_feature 1..21: note = Synthetic
  modified_base 6: mod_base = OTHER; note = 2'-deoxy-2'-fluoro modified nucleotide
  modified_base 8: mod_base = OTHER; note = 2'-deoxy-2'-fluoro modified nucleotide
  modified_base 10: mod_base = OTHER; note = 2'-deoxy-2'-fluoro modified nucleotide
  modified_base 17: mod_base = OTHER; note = 2'-deoxy-2'-fluoro modified nucleotide
  modified_base 20..21: mod_base = OTHER; note = 2'-O-methyl modified nucleotide
  source 1..21: mol_type = other RNA
atgtcacacatcttccatctt

SEQ ID NO: 794 - RNA, 21 nt, synthetic construct
  misc_feature 1..21: note = Synthetic
  misc_feature 1: note = Nucleotide linked to an inverted abasic cap
  modified_base 1..2: mod_base = OTHER; note = 2'-O-methyl modified nucleotide
  modified_base 4: mod_base = OTHER; note = 2'-O-methyl modified nucleotide
  modified_base 6: mod_base = OTHER; note = 2'-O-methyl modified nucleotide
  modified_base 8..9: mod_base = OTHER; note = 2'-O-methyl modified nucleotide
  modified_base 11: mod_base = OTHER; note = 2'-O-methyl modified nucleotide
  modified_base 13: mod_base = OTHER; note = 2'-O-methyl modified nucleotide
  modified_base 15: mod_base = OTHER; note = 2'-O-methyl modified nucleotide
  modified_base 17: mod_base = OTHER; note = 2'-O-methyl modified nucleotide
  modified_base 19..21: mod_base = OTHER; note = 2'-O-methyl modified nucleotide
  misc_feature 21: note = Nucleotide linked to an inverted abasic cap
  source 1..21: mol_type = other RNA
gatgtgtgacatgtatatatt

SEQ ID NO: 795 - RNA, 21 nt, synthetic construct
  misc_feature 1..21: note = Synthetic
  modified_base 4: mod_base = OTHER; note = 2'-deoxy-2'-fluoro modified nucleotide
  modified_base 6: mod_base = OTHER; note = 2'-deoxy-2'-fluoro modified nucleotide
  modified_base 8: mod_base = OTHER; note = 2'-deoxy-2'-fluoro modified nucleotide
  modified_base 10: mod_base = OTHER; note = 2'-deoxy-2'-fluoro modified nucleotide
  modified_base 13: mod_base = OTHER; note = 2'-deoxy-2'-fluoro modified nucleotide
  modified_base 15: mod_base = OTHER; note = 2'-deoxy-2'-fluoro modified nucleotide
  modified_base 17: mod_base = OTHER; note = 2'-deoxy-2'-fluoro modified nucleotide
  modified_base 20..21: mod_base = OTHER; note = 2'-O-methyl modified nucleotide
  source 1..21: mol_type = other RNA
tatatacatgtcacacatctt

SEQ ID NO: 796 - RNA, 21 nt, synthetic construct
  misc_feature 1..21: note = Synthetic
  misc_feature 1: note = Nucleotide linked to an inverted abasic cap
  modified_base 1..5: mod_base = OTHER; note = 2'-O-methyl modified nucleotide
  modified_base 7: mod_base = OTHER; note = 2'-O-methyl modified nucleotide
  modified_base 9: mod_base = OTHER; note = 2'-O-methyl modified nucleotide
  modified_base 11..12: mod_base = OTHER; note = 2'-O-methyl modified nucleotide
  modified_base 14: mod_base = OTHER; note = 2'-O-methyl modified nucleotide
  modified_base 16: mod_base = OTHER; note = 2'-O-methyl modified nucleotide
  modified_base 18: mod_base = OTHER; note = 2'-O-methyl modified nucleotide
  modified_base 20..21: mod_base = OTHER; note = 2'-O-methyl modified nucleotide
  misc_feature 21: note = Nucleotide linked to an inverted abasic cap
  source 1..21: mol_type = other RNA
gaagatgtgtgacatgtattt

SEQ ID NO: 797 - RNA, 21 nt, synthetic construct
  misc_feature 1..21: note = Synthetic
  modified_base 2: mod_base = OTHER; note = 2'-deoxy-2'-fluoro modified nucleotide
  modified_base 4: mod_base = OTHER; note = 2'-deoxy-2'-fluoro modified nucleotide
  modified_base 6: mod_base = OTHER; note = 2'-deoxy-2'-fluoro modified nucleotide
  modified_base 8..9: mod_base = OTHER; note = 2'-deoxy-2'-fluoro modified nucleotide
  modified_base 11: mod_base = OTHER; note = 2'-deoxy-2'-fluoro modified nucleotide
  modified_base 13: mod_base = OTHER; note = 2'-deoxy-2'-fluoro modified nucleotide
  modified_base 15..19: mod_base = OTHER; note = 2'-deoxy-2'-fluoro modified nucleotide
  modified_base 20..21: mod_base = OTHER; note = 2'-O-methyl modified nucleotide
  source 1..21: mol_type = other RNA
atacatgtcacacatcttctt

SEQ ID NO: 798 - RNA, 21 nt, synthetic construct
  misc_feature 1..21: note = Synthetic
  misc_feature 1: note = Nucleotide linked to an inverted abasic cap
  modified_base 6: mod_base = OTHER; note = 2'-O-methyl modified nucleotide
  modified_base 8: mod_base = OTHER; note = 2'-O-methyl modified nucleotide
  modified_base 10: mod_base = OTHER; note = 2'-O-methyl modified nucleotide
  modified_base 13: mod_base = OTHER; note = 2'-O-methyl modified nucleotide
  modified_base 15: mod_base = OTHER; note = 2'-O-methyl modified nucleotide
  modified_base 17: mod_base = OTHER; note = 2'-O-methyl modified nucleotide
  modified_base 19..21: mod_base = OTHER; note = 2'-O-methyl modified nucleotide
  misc_feature 21: note = Nucleotide linked to an inverted abasic cap
  source 1..21: mol_type = other RNA
gaagatgtgtgacatgtattt

SEQ ID NO: 799 - RNA, 21 nt, synthetic construct
  misc_feature 1..21: note = Synthetic
  modified_base 5: mod_base = OTHER; note = 2'-O-methyl modified nucleotide
  modified_base 7: mod_base = OTHER; note = 2'-O-methyl modified nucleotide
  modified_base 10: mod_base = OTHER; note = 2'-O-methyl modified nucleotide
  modified_base 12: mod_base = OTHER; note = 2'-O-methyl modified nucleotide
  modified_base 20..21: mod_base = OTHER; note = 2'-O-methyl modified nucleotide
  source 1..21: mol_type = other RNA
atacatgtcacacatcttctt

SEQ ID NO: 800 - RNA, 21 nt, synthetic construct
  misc_feature 1..21: note = Synthetic
  misc_feature 1: note = Nucleotide linked to an inverted abasic cap
  modified_base 1..2: mod_base = OTHER; note = 2'-O-methyl modified nucleotide
  modified_base 3: mod_base = OTHER; note = 2'-deoxy-2'-fluoro modified nucleotide
  modified_base 4: mod_base = OTHER; note = 2'-O-methyl modified nucleotide
  modified_base 5: mod_base = OTHER; note = 2'-deoxy-2'-fluoro modified nucleotide
  modified_base 6: mod_base = OTHER; note = 2'-O-methyl modified nucleotide
  modified_base 7: mod_base = OTHER; note = 2'-deoxy-2'-fluoro modified nucleotide
  modified_base 8..9: mod_base = OTHER; note = 2'-O-methyl modified nucleotide
  modified_base 10: mod_base = OTHER; note = 2'-deoxy-2'-fluoro modified nucleotide
  modified_base 11: mod_base = OTHER; note = 2'-O-methyl modified nucleotide
  modified_base 12: mod_base = OTHER; note = 2'-deoxy-2'-fluoro modified nucleotide
  modified_base 13: mod_base = OTHER; note = 2'-O-methyl modified nucleotide
  modified_base 14: mod_base = OTHER; note = 2'-deoxy-2'-fluoro modified nucleotide
  modified_base 15: mod_base = OTHER; note = 2'-O-methyl modified nucleotide
  modified_base 16: mod_base = OTHER; note = 2'-deoxy-2'-fluoro modified nucleotide
  modified_base 17: mod_base = OTHER; note = 2'-O-methyl modified nucleotide
  modified_base 18: mod_base = OTHER; note = 2'-deoxy-2'-fluoro modified nucleotide
  modified_base 19..21: mod_base = OTHER; note = 2'-O-methyl modified nucleotide
  misc_feature 21: note = Nucleotide linked to an inverted abasic cap
  source 1..21: mol_type = other RNA
gatgtgtgacatgtatatatt

SEQ ID NO: 801 - RNA, 21 nt, synthetic construct
  misc_feature 1..21: note = Synthetic
  modified_base 4: mod_base = OTHER; note = 2'-deoxy-2'-fluoro modified nucleotide
  modified_base 5: mod_base = OTHER; note = 2'-O-methyl modified nucleotide
  modified_base 6: mod_base = OTHER; note = 2'-deoxy-2'-fluoro modified nucleotide
  modified_base 7: mod_base = OTHER; note = 2'-O-methyl modified nucleotide
  modified_base 8: mod_base = OTHER; note = 2'-deoxy-2'-fluoro modified nucleotide
  modified_base 9: mod_base = OTHER; note = 2'-O-methyl modified nucleotide
  modified_base 10: mod_base = OTHER; note = 2'-deoxy-2'-fluoro modified nucleotide
  modified_base 11..12: mod_base = OTHER; note = 2'-O-methyl modified nucleotide
  modified_base 13: mod_base = OTHER; note = 2'-deoxy-2'-fluoro modified nucleotide
  modified_base 14: mod_base = OTHER; note = 2'-O-methyl modified nucleotide
  modified_base 15: mod_base = OTHER; note = 2'-deoxy-2'-fluoro modified nucleotide
  modified_base 16: mod_base = OTHER; note = 2'-O-methyl modified nucleotide
  modified_base 17: mod_base = OTHER; note = 2'-deoxy-2'-fluoro modified nucleotide
  modified_base 18..21: mod_base = OTHER; note = 2'-O-methyl modified nucleotide
  source 1..21: mol_type = other RNA
tatatacatgtcacacatctt

SEQ ID NO: 802 - RNA, 21 nt, synthetic construct
  misc_feature 1..21: note = Synthetic
  modified_base 4: mod_base = OTHER; note = 2'-O-methyl modified nucleotide
  modified_base 6: mod_base = OTHER; note = 2'-O-methyl modified nucleotide
  modified_base 8..9: mod_base = OTHER; note = 2'-O-methyl modified nucleotide
  modified_base 11: mod_base = OTHER; note = 2'-O-methyl modified nucleotide
  modified_base 13: mod_base = OTHER; note = 2'-O-methyl modified nucleotide
  modified_base 15..21: mod_base = OTHER; note = 2'-O-methyl modified nucleotide
  source 1..21: mol_type = other RNA
atacatgtcacacatcttctt

SEQ ID NO: 803 - RNA, 21 nt, synthetic construct
  misc_feature 1..21: note = Synthetic
  misc_feature 1: note = Nucleotide linked to an inverted abasic cap
  modified_base 2: mod_base = OTHER; note = 2'-O-methyl modified nucleotide
  modified_base 4: mod_base = OTHER; note = 2'-O-methyl modified nucleotide
  modified_base 6..7: mod_base = OTHER; note = 2'-O-methyl modified nucleotide
  modified_base 9: mod_base = OTHER; note = 2'-O-methyl modified nucleotide
  modified_base 11: mod_base = OTHER; note = 2'-O-methyl modified nucleotide
  modified_base 13: mod_base = OTHER; note = 2'-O-methyl modified nucleotide
  modified_base 15: mod_base = OTHER; note = 2'-O-methyl modified nucleotide
  modified_base 17: mod_base = OTHER; note = 2'-O-methyl modified nucleotide
  modified_base 20..21: mod_base = OTHER; note = 2'-O-methyl modified nucleotide
  misc_feature 21: note = Nucleotide linked to an inverted abasic cap
  source 1..21: mol_type = other RNA
tgtgtgacatgtatatatttt

SEQ ID NO: 804 - RNA, 21 nt, synthetic construct
  misc_feature 1..21: note = Synthetic
  modified_base 4: mod_base = OTHER; note = 2'-deoxy-2'-fluoro modified nucleotide
  modified_base 5: mod_base = OTHER; note = 2'-O-methyl modified nucleotide
  modified_base 6: mod_base = OTHER; note = 2'-deoxy-2'-fluoro modified nucleotide
  modified_base 7: mod_base = OTHER; note = 2'-O-methyl modified nucleotide
  modified_base 8: mod_base = OTHER; note = 2'-deoxy-2'-fluoro modified nucleotide
  modified_base 9: mod_base = OTHER; note = 2'-O-methyl modified nucleotide
  modified_base 10: mod_base = OTHER; note = 2'-deoxy-2'-fluoro modified nucleotide
  modified_base 11: mod_base = OTHER; note = 2'-O-methyl modified nucleotide
  modified_base 12: mod_base = OTHER; note = 2'-deoxy-2'-fluoro modified nucleotide
  modified_base 13..14: mod_base = OTHER; note = 2'-O-methyl modified nucleotide
  modified_base 15: mod_base = OTHER; note = 2'-deoxy-2'-fluoro modified nucleotide
  modified_base 16: mod_base = OTHER; note = 2'-O-methyl modified nucleotide
  modified_base 17: mod_base = OTHER; note = 2'-deoxy-2'-fluoro modified nucleotide
  modified_base 18: mod_base = OTHER; note = 2'-O-methyl modified nucleotide
  modified_base 19: mod_base = OTHER; note = 2'-deoxy-2'-fluoro modified nucleotide
  modified_base 20..21: mod_base = OTHER; note = 2'-O-methyl modified nucleotide
  source 1..21: mol_type = other RNA
aatatatacatgtcacacatt

SEQ ID NO: 805 - RNA, 21 nt, synthetic construct
  misc_feature 1..21: note = Synthetic
  modified_base 5: mod_base = OTHER; note = 2'-O-methyl modified nucleotide
  modified_base 7: mod_base = OTHER; note = 2'-O-methyl modified nucleotide
  modified_base 9: mod_base = OTHER; note = 2'-O-methyl modified nucleotide
  modified_base 11: mod_base = OTHER; note = 2'-O-methyl modified nucleotide
  modified_base 13: mod_base = OTHER; note = 2'-O-methyl modified nucleotide
  modified_base 16: mod_base = OTHER; note = 2'-O-methyl modified nucleotide
  modified_base 18: mod_base = OTHER; note = 2'-O-methyl modified nucleotide
  modified_base 20..21: mod_base = OTHER; note = 2'-O-methyl modified nucleotide
  source 1..21: mol_type = other RNA
aatatatacatgtcacacatt

SEQ ID NO: 806 - RNA, 21 nt, synthetic construct
  misc_feature 1..21: note = Synthetic
  modified_base 4..5: mod_base = OTHER; note = 2'-O-methyl modified nucleotide
  modified_base 6: mod_base = OTHER; note = 2'-deoxy-2'-fluoro modified nucleotide
  modified_base 7: mod_base = OTHER; note = 2'-O-methyl modified nucleotide
  modified_base 8: mod_base = OTHER; note = 2'-deoxy-2'-fluoro modified nucleotide
  modified_base 9: mod_base = OTHER; note = 2'-O-methyl modified nucleotide
  modified_base 10: mod_base = OTHER; note = 2'-deoxy-2'-fluoro modified nucleotide
  modified_base 11..16: mod_base = OTHER; note = 2'-O-methyl modified nucleotide
  modified_base 17: mod_base = OTHER; note = 2'-deoxy-2'-fluoro modified nucleotide
  modified_base 18..21: mod_base = OTHER; note = 2'-O-methyl modified nucleotide
  source 1..21: mol_type = other RNA
atgtcacacatcttccatctt

SEQ ID NO: 807 - RNA, 21 nt, synthetic construct
  misc_feature 1..21: note = Synthetic
  misc_feature 1: note = Nucleotide linked to an inverted abasic cap
  modified_base 1..2: mod_base = OTHER; note = 2'-O-methyl modified nucleotide
  modified_base 4..9: mod_base = OTHER; note = 2'-O-methyl modified nucleotide
  modified_base 11: mod_base = OTHER; note = 2'-O-methyl modified nucleotide
  modified_base 13: mod_base = OTHER; note = 2'-O-methyl modified nucleotide
  modified_base 15..16: mod_base = OTHER; note = 2'-O-methyl modified nucleotide
  modified_base 18: mod_base = OTHER; note = 2'-O-methyl modified nucleotide
  modified_base 20..21: mod_base = OTHER; note = 2'-O-methyl modified nucleotide
  misc_feature 21: note = Nucleotide linked to an inverted abasic cap
  source 1..21: mol_type = other RNA
gatggaagatgtgtgacattt

SEQ ID NO: 808 - RNA, 21 nt, synthetic construct
  misc_feature 1..21: note = Synthetic
  modified_base 6: mod_base = OTHER; note = 2'-O-methyl modified nucleotide
  modified_base 8: mod_base = OTHER; note = 2'-O-methyl modified nucleotide
  modified_base 10: mod_base = OTHER; note = 2'-O-methyl modified nucleotide
  modified_base 17: mod_base = OTHER; note = 2'-O-methyl modified nucleotide
  modified_base 20..21: mod_base = OTHER; note = 2'-O-methyl modified nucleotide
  source 1..21: mol_type = other RNA
atgtcacacatcttccatctt

SEQ ID NO: 809 - RNA, 21 nt, synthetic construct
  misc_feature 1..21: note = Synthetic
  modified_base 4: mod_base = OTHER; note = 2'-O-methyl modified nucleotide
  modified_base 6: mod_base = OTHER; note = 2'-O-methyl modified nucleotide
  modified_base 8: mod_base = OTHER; note = 2'-O-methyl modified nucleotide
  modified_base 10: mod_base = OTHER; note = 2'-O-methyl modified nucleotide
  modified_base 13: mod_base = OTHER; note = 2'-O-methyl modified nucleotide
  modified_base 15: mod_base = OTHER; note = 2'-O-methyl modified nucleotide
  modified_base 17: mod_base = OTHER; note = 2'-O-methyl modified nucleotide
  modified_base 20..21: mod_base = OTHER; note = 2'-O-methyl modified nucleotide
  source 1..21: mol_type = other RNA
tatatacatgtcacacatctt

SEQ ID NO: 810 - RNA, 21 nt, synthetic construct
  misc_feature 1..21: note = Synthetic
  misc_feature 1: note = Nucleotide linked to an inverted abasic cap
  modified_base 3: mod_base = OTHER; note = 2'-O-methyl modified nucleotide
  modified_base 5: mod_base = OTHER; note = 2'-O-methyl modified nucleotide
  modified_base 7: mod_base = OTHER; note = 2'-O-methyl modified nucleotide
  modified_base 10: mod_base = OTHER; note = 2'-O-methyl modified nucleotide
  modified_base 12: mod_base = OTHER; note = 2'-O-methyl modified nucleotide
  modified_base 14: mod_base = OTHER; note = 2'-O-methyl modified nucleotide
  modified_base 16: mod_base = OTHER; note = 2'-O-methyl modified nucleotide
  modified_base 18: mod_base = OTHER; note = 2'-O-methyl modified nucleotide
  modified_base 20..21: mod_base = OTHER; note = 2'-O-methyl modified nucleotide
  misc_feature 21: note = Nucleotide linked to an inverted abasic cap
  source 1..21: mol_type = other RNA
gatgtgtgacatgtatatatt

SEQ ID NO: 811 - DNA, 21 bp, synthetic construct
  misc_feature 1..21: note = Synthetic
  misc_feature 1: note = Nucleotide linked to an inverted abasic cap
  modified_base 6: mod_base = OTHER; note = 2'-deoxy-2'-fluoro modified nucleotide
  modified_base 8: mod_base = OTHER; note = 2'-deoxy-2'-fluoro modified nucleotide
  modified_base 10: mod_base = OTHER; note = 2'-deoxy-2'-fluoro modified nucleotide
  modified_base 13: mod_base = OTHER; note = 2'-deoxy-2'-fluoro modified nucleotide
  modified_base 15: mod_base = OTHER; note = 2'-deoxy-2'-fluoro modified nucleotide
  modified_base 17: mod_base = OTHER; note = 2'-deoxy-2'-fluoro modified nucleotide
  modified_base 19: mod_base = OTHER; note = 2'-deoxy-2'-fluoro modified nucleotide
  modified_base 20..21: mod_base = OTHER; note = 2'-O-methyl modified nucleotide
  misc_feature 21: note = Nucleotide linked to an inverted abasic cap
  source 1..21: mol_type = other DNA
  misc_feature 1..5: note = DNA
  misc_feature 6: note = RNA
  misc_feature 7: note = DNA
  misc_feature 8: note = RNA
  misc_feature 9: note = DNA
  misc_feature 10: note = RNA
  misc_feature 11..12: note = DNA
  misc_feature 13: note = RNA
  misc_feature 14: note = DNA
  misc_feature 15: note = RNA
  misc_feature 16: note = DNA
  misc_feature 17: note = RNA
  misc_feature 18: note = DNA
  misc_feature 19..21: note = RNA
gaagatgtgtgacatgtattt

SEQ ID NO: 812 - RNA, 21 nt, synthetic construct
  misc_feature 1..21: note = Synthetic
  misc_feature 1: note = Nucleotide linked to an inverted abasic cap
  modified_base 1..5: mod_base = OTHER; note = 2'-O-methyl modified nucleotide
  modified_base 6: mod_base = OTHER; note = 2'-deoxy-2'-fluoro modified nucleotide
  modified_base 7: mod_base = OTHER; note = 2'-O-methyl modified nucleotide
  modified_base 8: mod_base = OTHER; note = 2'-deoxy-2'-fluoro modified nucleotide
  modified_base 9: mod_base = OTHER; note = 2'-O-methyl modified nucleotide
  modified_base 10: mod_base = OTHER; note = 2'-deoxy-2'-fluoro modified nucleotide
  modified_base 11..12: mod_base = OTHER; note = 2'-O-methyl modified nucleotide
  modified_base 13: mod_base = OTHER; note = 2'-deoxy-2'-fluoro modified nucleotide
  modified_base 14: mod_base = OTHER; note = 2'-O-methyl modified nucleotide
  modified_base 15: mod_base = OTHER; note = 2'-deoxy-2'-fluoro modified nucleotide
  modified_base 16: mod_base = OTHER; note = 2'-O-methyl modified nucleotide
  modified_base 17: mod_base = OTHER; note = 2'-deoxy-2'-fluoro modified nucleotide
  modified_base 18: mod_base = OTHER; note = 2'-O-methyl modified nucleotide
  modified_base 19: mod_base = OTHER; note = 2'-deoxy-2'-fluoro modified nucleotide
  modified_base 20..21: mod_base = OTHER; note = 2'-O-methyl modified nucleotide
  misc_feature 21: note = Nucleotide linked to an inverted abasic cap
  source 1..21: mol_type = other RNA
gaagatgtgtgacatgtattt

SEQ ID NO: 813 - RNA, 21 nt, synthetic construct
  misc_feature 1..21: note = Synthetic
  modified_base 4: mod_base = OTHER; note = 2'-O-methyl modified nucleotide
  modified_base 5: mod_base = OTHER; note = 2'-deoxy-2'-fluoro modified nucleotide
  modified_base 6: mod_base = OTHER; note = 2'-O-methyl modified nucleotide
  modified_base 7: mod_base = OTHER; note = 2'-deoxy-2'-fluoro modified nucleotide
  modified_base 8..9: mod_base = OTHER; note = 2'-O-methyl modified nucleotide
  modified_base 10: mod_base = OTHER; note = 2'-deoxy-2'-fluoro modified nucleotide
  modified_base 11: mod_base = OTHER; note = 2'-O-methyl modified nucleotide
  modified_base 12: mod_base = OTHER; note = 2'-deoxy-2'-fluoro modified nucleotide
  modified_base 13: mod_base = OTHER; note = 2'-O-methyl modified nucleotide
  modified_base 14: mod_base = OTHER; note = 2'-deoxy-2'-fluoro modified nucleotide
  modified_base 15..21: mod_base = OTHER; note = 2'-O-methyl modified nucleotide
  source 1..21: mol_type = other RNA
atacatgtcacacatcttctt

SEQ ID NO: 814 - RNA, 21 nt, synthetic construct
  misc_feature 1..21: note = Synthetic
  modified_base 1: mod_base = OTHER; note = 2'-deoxy-2'-fluoro modified nucleotide
  modified_base 3: mod_base = OTHER; note = 2'-deoxy-2'-fluoro modified nucleotide
  modified_base 5: mod_base = OTHER; note = 2'-deoxy-2'-fluoro modified nucleotide
  modified_base 7: mod_base = OTHER; note = 2'-deoxy-2'-fluoro modified nucleotide
  modified_base 9: mod_base = OTHER; note = 2'-deoxy-2'-fluoro modified nucleotide
  modified_base 11..12: mod_base = OTHER; note = 2'-deoxy-2'-fluoro modified nucleotide
  modified_base 14: mod_base = OTHER; note = 2'-deoxy-2'-fluoro modified nucleotide
  modified_base 16: mod_base = OTHER; note = 2'-deoxy-2'-fluoro modified nucleotide
  modified_base 18..19: mod_base = OTHER; note = 2'-deoxy-2'-fluoro modified nucleotide
  modified_base 20..21: mod_base = OTHER; note = 2'-O-methyl modified nucleotide
  source 1..21: mol_type = other RNA
tatatacatgtcacacatctt

SEQ ID NO: 815 - DNA, 21 bp, synthetic construct
  misc_feature 1..21: note = Synthetic
  misc_feature 1..19: note = ribonucleotide unmodified or modified as described for this sequence
  misc_feature 1: note = Nucleotide linked to an inverted abasic cap
  modified_base 3: mod_base = OTHER; note = 2'-deoxy-2'-fluoro modified nucleotide
  modified_base 5: mod_base = OTHER; note = 2'-deoxy-2'-fluoro modified nucleotide
  modified_base 7: mod_base = OTHER; note = 2'-deoxy-2'-fluoro modified nucleotide
  modified_base 10: mod_base = OTHER; note = 2'-deoxy-2'-fluoro modified nucleotide
  modified_base 12: mod_base = OTHER; note = 2'-deoxy-2'-fluoro modified nucleotide
  modified_base 14: mod_base = OTHER; note = 2'-deoxy-2'-fluoro modified nucleotide
  modified_base 16: mod_base = OTHER; note = 2'-deoxy-2'-fluoro modified nucleotide
  modified_base 18: mod_base = OTHER; note = 2'-deoxy-2'-fluoro modified nucleotide
  misc_feature 21: note = Nucleotide linked to an inverted abasic cap
  source 1..21: mol_type = other DNA
  misc_feature 1..19: note = RNA
  misc_feature 20..21: note = DNA
gatgtgtgacatgtatatatt

SEQ ID NO: 816 - DNA, 21 bp, synthetic construct
  misc_feature 1..21: note = Synthetic
  misc_feature 1..19: note = ribonucleotide unmodified or modified as described for this sequence
  misc_feature 1: note = Nucleotide linked to an inverted abasic cap
  modified_base 1: mod_base = OTHER; note = 2'-deoxy-2'-fluoro modified nucleotide
  modified_base 3: mod_base = OTHER; note = 2'-deoxy-2'-fluoro modified nucleotide
  modified_base 5: mod_base = OTHER; note = 2'-deoxy-2'-fluoro modified nucleotide
  modified_base 8: mod_base = OTHER; note = 2'-deoxy-2'-fluoro modified nucleotide
  modified_base 10: mod_base = OTHER; note = 2'-deoxy-2'-fluoro modified nucleotide
  modified_base 12: mod_base = OTHER; note = 2'-deoxy-2'-fluoro modified nucleotide
  modified_base 14: mod_base = OTHER; note = 2'-deoxy-2'-fluoro modified nucleotide
  modified_base 16: mod_base = OTHER; note = 2'-deoxy-2'-fluoro modified nucleotide
  modified_base 18..19: mod_base = OTHER; note = 2'-deoxy-2'-fluoro modified nucleotide
  misc_feature 21: note = Nucleotide linked to an inverted abasic cap
  source 1..21: mol_type = other DNA
  misc_feature 1..19: note = RNA
  misc_feature 20..21: note = DNA
tgtgtgacatgtatatatttt

SEQ ID NO: 817 - RNA, 21 nt, synthetic construct
  misc_feature 1..21: note = Synthetic
  modified_base 3: mod_base = OTHER; note = 2'-deoxy-2'-fluoro modified nucleotide
  modified_base 5: mod_base = OTHER; note = 2'-deoxy-2'-fluoro modified nucleotide
  modified_base 7: mod_base = OTHER; note = 2'-deoxy-2'-fluoro modified nucleotide
  modified_base 9: mod_base = OTHER; note = 2'-deoxy-2'-fluoro modified nucleotide
  modified_base 11: mod_base = OTHER; note = 2'-deoxy-2'-fluoro modified nucleotide
  modified_base 13..14: mod_base = OTHER; note = 2'-deoxy-2'-fluoro modified nucleotide
  modified_base 16: mod_base = OTHER; note = 2'-deoxy-2'-fluoro modified nucleotide
  modified_base 18: mod_base = OTHER; note = 2'-deoxy-2'-fluoro modified nucleotide
  modified_base 20..21: mod_base = OTHER; note = 2'-O-methyl modified nucleotide
  source 1..21: mol_type = other RNA
aatatatacatgtcacacatt

SEQ ID NO: 818 - DNA, 21 bp, synthetic construct
  misc_feature 1..21: note = Synthetic
  misc_feature 1..19: note = ribonucleotide unmodified or modified as described for this sequence
  misc_feature 1: note = Nucleotide linked to an inverted abasic cap
  misc_feature 21: note = Nucleotide linked to an inverted abasic cap
  source 1..21: mol_type = other DNA
  misc_feature 1..19: note = RNA
  misc_feature 20..21: note = DNA
gaagatgtgtgacatgtattt

SEQ ID NO: 819 - RNA, 21 nt, synthetic construct
  misc_feature 1..21: note = Synthetic
  modified_base 20..21: mod_base = OTHER; note = 2'-O-methyl modified nucleotide
  source 1..21: mol_type = other RNA
atacatgtcacacatcttctt

SEQ ID NO: 820 - DNA, 21 bp, synthetic construct
  misc_feature 1..21: note = Synthetic
  misc_feature 1..19: note = ribonucleotide unmodified or modified as described for this sequence
  misc_feature 1: note = Nucleotide linked to an inverted abasic cap
  modified_base 6: mod_base = OTHER; note = 2'-deoxy-2'-fluoro modified nucleotide
  modified_base 8: mod_base = OTHER; note = 2'-deoxy-2'-fluoro modified nucleotide
  modified_base 10: mod_base = OTHER; note = 2'-deoxy-2'-fluoro modified nucleotide
  modified_base 13: mod_base = OTHER; note = 2'-deoxy-2'-fluoro modified nucleotide
  modified_base 15: mod_base = OTHER; note = 2'-deoxy-2'-fluoro modified nucleotide
  modified_base 17: mod_base = OTHER; note = 2'-deoxy-2'-fluoro modified nucleotide
  modified_base 19: mod_base = OTHER; note = 2'-deoxy-2'-fluoro modified nucleotide
  misc_feature 21: note = Nucleotide linked to an inverted abasic cap
  source 1..21: mol_type = other DNA
  misc_feature 1..19: note = RNA
  misc_feature 20..21: note = DNA
gaagatgtgtgacatgtattt

SEQ ID NO: 821 - RNA, 21 nt, synthetic construct
  misc_feature 1..21: note = Synthetic
  misc_feature 1: note = Nucleotide linked to an inverted abasic cap
  modified_base 1: mod_base = OTHER; note = 2'-deoxy-2'-fluoro modified nucleotide
  modified_base 2: mod_base = OTHER; note = 2'-O-methyl modified nucleotide
  modified_base 3: mod_base = OTHER; note = 2'-deoxy-2'-fluoro modified nucleotide
  modified_base 4: mod_base = OTHER; note = 2'-O-methyl modified nucleotide
  modified_base 5: mod_base = OTHER; note = 2'-deoxy-2'-fluoro modified nucleotide
  modified_base 6..7: mod_base = OTHER; note = 2'-O-methyl modified nucleotide
  modified_base 8: mod_base = OTHER; note = 2'-deoxy-2'-fluoro modified nucleotide
  modified_base 9: mod_base = OTHER; note = 2'-O-methyl modified nucleotide
  modified_base 10: mod_base = OTHER; note = 2'-deoxy-2'-fluoro modified nucleotide
  modified_base 11: mod_base = OTHER; note = 2'-O-methyl modified nucleotide
  modified_base 12: mod_base = OTHER; note = 2'-deoxy-2'-fluoro modified nucleotide
  modified_base 13: mod_base = OTHER; note = 2'-O-methyl modified nucleotide
  modified_base 14: mod_base = OTHER; note = 2'-deoxy-2'-fluoro modified nucleotide
  modified_base 15: mod_base = OTHER; note = 2'-O-methyl modified nucleotide
  modified_base 16: mod_base = OTHER; note = 2'-deoxy-2'-fluoro modified nucleotide
  modified_base 17: mod_base = OTHER; note = 2'-O-methyl modified nucleotide
  modified_base 18..19: mod_base = OTHER; note = 2'-deoxy-2'-fluoro modified nucleotide
  modified_base 20..21: mod_base = OTHER; note = 2'-O-methyl modified nucleotide
  misc_feature 21: note = Nucleotide linked to an inverted abasic cap
  source 1..21: mol_type = other RNA
tgtgtgacatgtatatatttt

SEQ ID NO: 822 - DNA, 21 bp, synthetic construct
  misc_feature 1..21: note = Synthetic
  misc_feature 1..19: note = ribonucleotide unmodified or modified as described for this sequence
  misc_feature 1: note = Nucleotide linked to an inverted abasic cap
  misc_feature 21: note = Nucleotide linked to an inverted abasic cap
  source 1..21: mol_type = other DNA
  misc_feature 1..19: note = RNA
  misc_feature 20..21: note = DNA
gatggaagatgtgtgacattt

SEQ ID NO: 823 - RNA, 21 nt, synthetic construct
  misc_feature 1..21: note = Synthetic
  modified_base 20..21: mod_base = OTHER; note = 2'-O-methyl modified nucleotide
  source 1..21: mol_type = other RNA
atgtcacacatcttccatctt

SEQ ID NO: 824 - DNA, 21 bp, synthetic construct
  misc_feature 1..21: note = Synthetic
  misc_feature 1: note = Nucleotide linked to an inverted abasic cap
  modified_base 1: mod_base = OTHER; note = 2'-deoxy-2'-fluoro modified nucleotide
  modified_base 3: mod_base = OTHER; note = 2'-deoxy-2'-fluoro modified nucleotide
  modified_base 5: mod_base = OTHER; note = 2'-deoxy-2'-fluoro modified nucleotide
  modified_base 8: mod_base = OTHER; note = 2'-deoxy-2'-fluoro modified nucleotide
  modified_base 10: mod_base = OTHER; note = 2'-deoxy-2'-fluoro modified nucleotide
  modified_base 12: mod_base = OTHER; note = 2'-deoxy-2'-fluoro modified nucleotide
  modified_base 14: mod_base = OTHER; note = 2'-deoxy-2'-fluoro modified nucleotide
  modified_base 16: mod_base = OTHER; note = 2'-deoxy-2'-fluoro modified nucleotide
  modified_base 18..19: mod_base = OTHER; note = 2'-deoxy-2'-fluoro modified nucleotide
  modified_base 20..21: mod_base = OTHER; note = 2'-O-methyl modified nucleotide
  misc_feature 21: note = Nucleotide linked to an inverted abasic cap
  source 1..21: mol_type = other DNA
  misc_feature 1: note = RNA
  misc_feature 2: note = DNA
  misc_feature 3: note = RNA
  misc_feature 4: note = DNA
  misc_feature 5: note = RNA
  misc_feature 6..7: note = DNA
  misc_feature 8: note = RNA
  misc_feature 9: note = DNA
  misc_feature 10: note = RNA
  misc_feature 11: note = DNA
  misc_feature 12: note = RNA
  misc_feature 13: note = DNA
  misc_feature 14: note = RNA
  misc_feature 15: note = DNA
  misc_feature 16: note = RNA
  misc_feature 17: note = DNA
  misc_feature 18..21: note = RNA
tgtgtgacatgtatatatttt

SEQ ID NO: 825 - RNA, 21 nt, synthetic construct
  misc_feature 1..21: note = Synthetic
  misc_feature 1: note = Nucleotide linked to an inverted abasic cap
  modified_base 1: mod_base = OTHER; note = 2'-O-methyl modified nucleotide
  modified_base 3: mod_base = OTHER; note = 2'-O-methyl modified nucleotide
  modified_base 5: mod_base = OTHER; note = 2'-O-methyl modified nucleotide
  modified_base 8: mod_base = OTHER; note = 2'-O-methyl modified nucleotide
  modified_base 10: mod_base = OTHER; note = 2'-O-methyl modified nucleotide
  modified_base 12: mod_base = OTHER; note = 2'-O-methyl modified nucleotide
  modified_base 14: mod_base = OTHER; note = 2'-O-methyl modified nucleotide
  modified_base 16: mod_base = OTHER; note = 2'-O-methyl modified nucleotide
  modified_base 18..21: mod_base = OTHER; note = 2'-O-methyl modified nucleotide
  misc_feature 21: note = Nucleotide linked to an inverted abasic cap
  source 1..21: mol_type = other RNA
tgtgtgacatgtatatatttt

SEQ ID NO: 826 - RNA, 21 nt, synthetic construct
  misc_feature 1..21: note = Synthetic
  modified_base 4: mod_base = OTHER; note = 2'-deoxy-2'-fluoro modified nucleotide
  modified_base 6: mod_base = OTHER; note = 2'-deoxy-2'-fluoro modified nucleotide
  modified_base 8: mod_base = OTHER; note = 2'-deoxy-2'-fluoro modified nucleotide
  modified_base 10: mod_base = OTHER; note = 2'-deoxy-2'-fluoro modified nucleotide
  modified_base 12: mod_base = OTHER; note = 2'-deoxy-2'-fluoro modified nucleotide
  modified_base 15: mod_base = OTHER; note = 2'-deoxy-2'-fluoro modified nucleotide
  modified_base 17: mod_base = OTHER; note = 2'-deoxy-2'-fluoro modified nucleotide
  modified_base 19: mod_base = OTHER; note = 2'-deoxy-2'-fluoro modified nucleotide
  modified_base 20..21: mod_base = OTHER; note = 2'-O-methyl modified nucleotide
  source 1..21: mol_type = other RNA
aatatatacatgtcacacatt

SEQ ID NO: 827 - DNA, 21 bp, synthetic construct
  misc_feature 1..21: note = Synthetic
  misc_feature 1..19: note = ribonucleotide unmodified or modified as described for this sequence
  misc_feature 1: note = Nucleotide linked to an inverted abasic cap
  modified_base 3: mod_base = OTHER; note = 2'-deoxy-2'-fluoro modified nucleotide
  modified_base 10: mod_base = OTHER; note = 2'-deoxy-2'-fluoro modified nucleotide
  modified_base 12: mod_base = OTHER; note = 2'-deoxy-2'-fluoro modified nucleotide
  modified_base 14: mod_base = OTHER; note = 2'-deoxy-2'-fluoro modified nucleotide
  modified_base 17: mod_base = OTHER; note = 2'-deoxy-2'-fluoro modified nucleotide
  modified_base 19: mod_base = OTHER; note = 2'-deoxy-2'-fluoro modified nucleotide
  misc_feature 21: note = Nucleotide linked to an inverted abasic cap
  source 1..21: mol_type = other DNA
  misc_feature 1..19: note = RNA
  misc_feature 20..21: note = DNA
gatggaagatgtgtgacattt

SEQ ID NO: 828 - RNA, 21 nt, synthetic construct
  misc_feature 1..21: note = Synthetic
  modified_base 2: mod_base = OTHER; note = 2'-deoxy-2'-fluoro modified nucleotide
  modified_base 4..5: mod_base = OTHER; note = 2'-deoxy-2'-fluoro modified nucleotide
  modified_base 7: mod_base = OTHER; note = 2'-deoxy-2'-fluoro modified nucleotide
  modified_base 9: mod_base = OTHER; note = 2'-deoxy-2'-fluoro modified nucleotide
  modified_base 11..16: mod_base = OTHER; note = 2'-deoxy-2'-fluoro modified nucleotide
  modified_base 18..19: mod_base = OTHER; note = 2'-deoxy-2'-fluoro modified nucleotide
  modified_base 20..21: mod_base = OTHER; note = 2'-O-methyl modified nucleotide
  source 1..21: mol_type = other RNA
atgtcacacatcttccatctt

SEQ ID NO: 829 - RNA, 21 nt, synthetic construct
  misc_feature 1..21: note = Synthetic
  modified_base 5: mod_base = OTHER; note = 2'-O-methyl modified nucleotide
  modified_base 7: mod_base = OTHER; note = 2'-O-methyl modified nucleotide
  modified_base 9: mod_base = OTHER; note = 2'-O-methyl modified nucleotide
  modified_base 11..12: mod_base = OTHER; note = 2'-O-methyl modified nucleotide
  modified_base 16: mod_base = OTHER; note = 2'-O-methyl modified nucleotide
  modified_base 18..21: mod_base = OTHER; note = 2'-O-methyl modified nucleotide
  source 1..21: mol_type = other RNA
tatatacatgtcacacatctt

SEQ ID NO: 830 - DNA, 21 bp, synthetic construct
  misc_feature 1..21: note = Synthetic
  misc_feature 1: note = Nucleotide linked to an inverted abasic cap
  modified_base 3: mod_base = OTHER; note = 2'-deoxy-2'-fluoro modified nucleotide
  modified_base 10: mod_base = OTHER; note = 2'-deoxy-2'-fluoro modified nucleotide
  modified_base 12: mod_base = OTHER; note = 2'-deoxy-2'-fluoro modified nucleotide
  modified_base 14: mod_base = OTHER; note = 2'-deoxy-2'-fluoro modified nucleotide
  modified_base 17: mod_base = OTHER; note = 2'-deoxy-2'-fluoro modified nucleotide
  modified_base 19: mod_base = OTHER; note = 2'-deoxy-2'-fluoro modified nucleotide
  modified_base 20..21: mod_base = OTHER; note = 2'-O-methyl modified nucleotide
  misc_feature 21: note = Nucleotide linked to an inverted abasic cap
  source 1..21: mol_type = other DNA
  misc_feature 1..2: note = DNA
  misc_feature 3: note = RNA
  misc_feature 4..9: note = DNA
  misc_feature 10: note = RNA
  misc_feature 11: note = DNA
  misc_feature 12: note = RNA
  misc_feature 13: note = DNA
  misc_feature 14: note = RNA
  misc_feature 15..16: note = DNA
  misc_feature 17: note = RNA
  misc_feature 18: note = DNA
  misc_feature 19..21: note = RNA
gatggaagatgtgtgacattt

SEQ ID NO: 831 - DNA, 21 bp, synthetic construct
  misc_feature 1..21: note = Synthetic
  misc_feature 1..19: note = ribonucleotide unmodified or modified as described for this sequence
  misc_feature 1: note = Nucleotide linked to an inverted abasic cap
  misc_feature 21: note = Nucleotide linked to an inverted abasic cap
  source 1..21: mol_type = other DNA
  misc_feature 1..19: note = RNA
  misc_feature 20..21: note = DNA
gatgtgtgacatgtatatatt

SEQ ID NO: 832 - RNA, 21 nt, synthetic construct
  misc_feature 1..21: note = Synthetic
  modified_base 20..21: mod_base = OTHER; note = 2'-O-methyl modified nucleotide
  source 1..21: mol_type = other RNA
tatatacatgtcacacatctt

SEQ ID NO: 833 - RNA, 21 nt, synthetic construct
  misc_feature 1..21: note = Synthetic
  modified_base 5: mod_base = OTHER; note = 2'-deoxy-2'-fluoro modified nucleotide
  modified_base 7: mod_base = OTHER; note = 2'-deoxy-2'-fluoro modified nucleotide
  modified_base 10: mod_base = OTHER; note = 2'-deoxy-2'-fluoro modified nucleotide
  modified_base 12: mod_base = OTHER; note = 2'-deoxy-2'-fluoro modified nucleotide
  modified_base 14: mod_base = OTHER; note = 2'-deoxy-2'-fluoro modified nucleotide
  modified_base 20..21: mod_base = OTHER; note = 2'-O-methyl modified nucleotide
  source 1..21: mol_type = other RNA
atacatgtcacacatcttctt

SEQ ID NO: 834 - DNA, 21 bp, synthetic construct
  misc_feature 1..21: note = Synthetic
  misc_feature 1..19: note = ribonucleotide unmodified or modified as described for this sequence
  misc_feature 1: note = Nucleotide linked to an inverted abasic cap
  misc_feature 21: note = Nucleotide linked to an inverted abasic cap
  source 1..21: mol_type = other DNA
  misc_feature 1..19: note = RNA
  misc_feature 20..21: note = DNA
tgtgtgacatgtatatatttt

SEQ ID NO: 835 - RNA, 21 nt, synthetic construct
  misc_feature 1..21: note = Synthetic
  modified_base 20..21: mod_base = OTHER; note = 2'-O-methyl modified nucleotide
  source 1..21: mol_type = other RNA
aatatatacatgtcacacatt

SEQ ID NO: 836 - RNA, 21 nt, synthetic construct
  misc_feature 1..21: note = Synthetic
  modified_base 4: mod_base = OTHER; note = 2'-O-methyl modified nucleotide
  modified_base 6: mod_base = OTHER; note = 2'-O-methyl modified nucleotide
  modified_base 8: mod_base = OTHER; note = 2'-O-methyl modified nucleotide
  modified_base 10: mod_base = OTHER; note = 2'-O-methyl modified nucleotide
  modified_base 12: mod_base = OTHER; note = 2'-O-methyl modified nucleotide
  modified_base 15: mod_base = OTHER; note = 2'-O-methyl modified nucleotide
  modified_base 17: mod_base = OTHER; note = 2'-O-methyl modified nucleotide
  modified_base 19..21: mod_base = OTHER; note = 2'-O-methyl modified nucleotide
  source 1..21: mol_type = other RNA
aatatatacatgtcacacatt

SEQ ID NO: 837 - DNA, 21 bp, synthetic construct
  misc_feature 1..21: note = Synthetic
  misc_feature 1: note = Nucleotide linked to an inverted abasic cap
  modified_base 3: mod_base = OTHER; note = 2'-deoxy-2'-fluoro modified nucleotide
  modified_base 5: mod_base = OTHER; note = 2'-deoxy-2'-fluoro modified nucleotide
  modified_base 7: mod_base = OTHER; note = 2'-deoxy-2'-fluoro modified nucleotide
  modified_base 10: mod_base = OTHER; note = 2'-deoxy-2'-fluoro modified nucleotide
  modified_base 12: mod_base = OTHER; note = 2'-deoxy-2'-fluoro modified nucleotide
  modified_base 14: mod_base = OTHER; note = 2'-deoxy-2'-fluoro modified nucleotide
  modified_base 16: mod_base = OTHER; note = 2'-deoxy-2'-fluoro modified nucleotide
  modified_base 18: mod_base = OTHER; note = 2'-deoxy-2'-fluoro modified nucleotide
  modified_base 20..21: mod_base = OTHER; note = 2'-O-methyl modified nucleotide
  misc_feature 21: note = Nucleotide linked to an inverted abasic cap
  source 1..21: mol_type = other DNA
  misc_feature 1..2: note = DNA
  misc_feature 3: note = RNA
  misc_feature 4: note = DNA
  misc_feature 5: note = RNA
  misc_feature 6: note = DNA
  misc_feature 7: note = RNA
  misc_feature 8..9: note = DNA
  misc_feature 10: note = RNA
  misc_feature 11: note = DNA
  misc_feature 12: note = RNA
  misc_feature 13: note = DNA
  misc_feature 14: note = RNA
  misc_feature 15: note = DNA
  misc_feature 16: note = RNA
  misc_feature 17: note = DNA
  misc_feature 18: note = RNA
  misc_feature 19: note = DNA
  misc_feature 20..21: note = RNA
gatgtgtgacatgtatatatt

SEQ ID NO: 838 - RNA, 21 nt, synthetic construct
  misc_feature 1..21: note = Synthetic
  misc_feature 1: note = Nucleotide linked to an inverted abasic cap
  modified_base 1: mod_base = OTHER; note = 2'-O-methyl modified nucleotide
  modified_base 2..3: mod_base = OTHER; note = 2'-deoxy-2'-fluoro modified nucleotide
  modified_base 4: mod_base = OTHER; note = 2'-O-methyl modified nucleotide
  modified_base 5: mod_base = OTHER; note = 2'-deoxy-2'-fluoro modified nucleotide
  modified_base 6: mod_base = OTHER; note = 2'-O-methyl modified nucleotide
  modified_base 7..8: mod_base = OTHER; note = 2'-deoxy-2'-fluoro modified nucleotide
  modified_base 9..10: mod_base = OTHER; note = 2'-O-methyl modified nucleotide
  modified_base 11: mod_base = OTHER; note = 2'-deoxy-2'-fluoro modified nucleotide
  modified_base 12..13: mod_base = OTHER; note = 2'-O-methyl modified nucleotide
  modified_base 14..16: mod_base = OTHER; note = 2'-deoxy-2'-fluoro modified nucleotide
  modified_base 17..21: mod_base = OTHER; note = 2'-O-methyl modified nucleotide
  modified_base 20..21: mod_base = OTHER; note = phosphorothioate linkage
  misc_feature 21: note = Nucleotide linked to an inverted abasic cap
  source 1..21: mol_type = other RNA
gtcatgttgataatccaaatt

SEQ ID NO: 839 - RNA, 21 nt, synthetic construct
  misc_feature 1..21: note = Synthetic
  modified_base 4..6: mod_base = OTHER; note = 2'-deoxy-2'-fluoro modified nucleotide
  modified_base 9: mod_base = OTHER; note = 2'-deoxy-2'-fluoro modified nucleotide
  modified_base 12..13: mod_base = OTHER; note = 2'-deoxy-2'-fluoro modified nucleotide
  modified_base 15: mod_base = OTHER; note = 2'-deoxy-2'-fluoro modified nucleotide
  modified_base 17..18: mod_base = OTHER; note = 2'-deoxy-2'-fluoro modified nucleotide
  modified_base 20..21: mod_base = OTHER; note = 2'-O-methyl modified nucleotide
  modified_base 20..21: mod_base = OTHER; note = phosphorothioate linkage
  source 1..21: mol_type = other RNA
tttggattatcaacatgactt

SEQ ID NO: 840 - RNA, 21 nt, synthetic construct
  misc_feature 1..21: note = Synthetic
  modified_base 1..3: mod_base = OTHER; note = 2'-deoxy-2'-fluoro modified nucleotide
  modified_base 7..8: mod_base = OTHER; note = 2'-deoxy-2'-fluoro modified nucleotide
  modified_base 10..11: mod_base = OTHER; note = 2'-deoxy-2'-fluoro modified nucleotide
  modified_base 14: mod_base = OTHER; note = 2'-deoxy-2'-fluoro modified nucleotide
  modified_base 16: mod_base = OTHER; note = 2'-deoxy-2'-fluoro modified nucleotide
  modified_base 19: mod_base = OTHER; note = 2'-deoxy-2'-fluoro modified nucleotide
  modified_base 20..21: mod_base = OTHER; note = 2'-O-methyl modified nucleotide
  modified_base 20..21: mod_base = OTHER; note = phosphorothioate linkage
  source 1..21: mol_type = other RNA
tttggattatcaacatgactt

SEQ ID NO: 841 - RNA, 21 nt, synthetic construct
  misc_feature 1..21: note = Synthetic
  misc_feature 1: note = Nucleotide linked to an inverted abasic cap
  modified_base 2..3: mod_base = OTHER; note = 2'-O-methyl modified nucleotide
  modified_base 5: mod_base = OTHER; note = 2'-O-methyl modified nucleotide
  modified_base 7..8: mod_base = OTHER; note = 2'-O-methyl modified nucleotide
  modified_base 11: mod_base = OTHER; note = 2'-O-methyl modified nucleotide
  modified_base 14..16: mod_base = OTHER; note = 2'-O-methyl modified nucleotide
  modified_base 20..21: mod_base = OTHER; note = 2'-O-methyl modified nucleotide
  modified_base 20..21: mod_base = OTHER; note = phosphorothioate linkage
  misc_feature 21: note = Nucleotide linked to an inverted abasic cap
  source 1..21: mol_type = other RNA
gtcatgttgataatccaaatt

SEQ ID NO: 842 - RNA, 21 nt, synthetic construct
  misc_feature 1..21: note = Synthetic
  misc_feature 1: note = Nucleotide linked to an inverted abasic cap
  modified_base 1: mod_base = OTHER; note = 2'-O-methyl modified nucleotide
  modified_base 2..3: mod_base = OTHER; note = 2'-deoxy-2'-fluoro modified nucleotide
  modified_base 4: mod_base = OTHER; note = 2'-O-methyl modified nucleotide
  modified_base 5: mod_base = OTHER; note = 2'-deoxy-2'-fluoro modified nucleotide
  modified_base 6: mod_base = OTHER; note = 2'-O-methyl modified nucleotide
  modified_base 7: mod_base = OTHER; note = 2'-deoxy-2'-fluoro modified nucleotide
  modified_base 8: mod_base = OTHER; note = 2'-O-methyl modified nucleotide
  modified_base 9: mod_base = OTHER; note = 2'-deoxy-2'-fluoro modified nucleotide
  modified_base 10: mod_base = OTHER; note = 2'-O-methyl modified nucleotide
  modified_base 11..12: mod_base = OTHER; note = 2'-deoxy-2'-fluoro modified nucleotide
  modified_base 13: mod_base = OTHER; note = 2'-O-methyl modified nucleotide
  modified_base 14: mod_base = OTHER; note = 2'-deoxy-2'-fluoro modified nucleotide
  modified_base 15: mod_base = OTHER; note = 2'-O-methyl modified nucleotide
  modified_base 16..17: mod_base = OTHER; note = 2'-deoxy-2'-fluoro modified nucleotide
  modified_base 18..21: mod_base = OTHER; note = 2'-O-methyl modified nucleotide
  modified_base 20..21: mod_base = OTHER; note = phosphorothioate linkage
  misc_feature 21: note = Nucleotide linked to an inverted abasic cap
  source 1..21: mol_type = other RNA
gttatgtacgtcatgttgatt

SEQ ID NO: 843 - RNA, 21 nt, synthetic construct
  misc_feature 1..21: note = Synthetic
  modified_base 4: mod_base = OTHER; note = 2'-O-methyl modified nucleotide
  modified_base 5: mod_base = OTHER; note = 2'-deoxy-2'-fluoro modified nucleotide
  modified_base 6: mod_base = OTHER; note = 2'-O-methyl modified nucleotide
  modified_base 7: mod_base = OTHER; note = 2'-deoxy-2'-fluoro modified nucleotide
  modified_base 8..9: mod_base = OTHER; note = 2'-O-methyl modified nucleotide
  modified_base 10: mod_base = OTHER; note = 2'-deoxy-2'-fluoro modified nucleotide
  modified_base 11: mod_base = OTHER; note = 2'-O-methyl modified nucleotide
  modified_base 12: mod_base = OTHER; note = 2'-deoxy-2'-fluoro modified nucleotide
  modified_base 13: mod_base = OTHER; note = 2'-O-methyl modified nucleotide
  modified_base 14: mod_base = OTHER; note = 2'-deoxy-2'-fluoro modified nucleotide
  modified_base 15: mod_base = OTHER; note = 2'-O-methyl modified nucleotide
  modified_base 16: mod_base = OTHER; note = 2'-deoxy-2'-fluoro modified nucleotide
  modified_base 17..18: mod_base = OTHER; note = 2'-O-methyl modified nucleotide
  modified_base 19: mod_base = OTHER; note = 2'-deoxy-2'-fluoro modified nucleotide
  modified_base 20..21: mod_base = OTHER; note = 2'-O-methyl modified nucleotide
  modified_base 20..21: mod_base = OTHER; note = phosphorothioate linkage
  source 1..21: mol_type = other RNA
tcaacatgacgtacataactt

SEQ ID NO: 844 - RNA, 21 nt, synthetic construct
  misc_feature 1..21: note = Synthetic
  modified_base 1..2: mod_base = OTHER; note = 2'-deoxy-2'-fluoro modified nucleotide
  modified_base 5: mod_base = OTHER; note = 2'-deoxy-2'-fluoro modified nucleotide
  modified_base 7: mod_base = OTHER; note = 2'-deoxy-2'-fluoro modified nucleotide
  modified_base 10: mod_base = OTHER; note = 2'-deoxy-2'-fluoro modified nucleotide
  modified_base 12: mod_base = OTHER; note = 2'-deoxy-2'-fluoro modified nucleotide
  modified_base 14: mod_base = OTHER; note = 2'-deoxy-2'-fluoro modified nucleotide
  modified_base 16: mod_base = OTHER; note = 2'-deoxy-2'-fluoro modified nucleotide
  modified_base 19: mod_base = OTHER; note = 2'-deoxy-2'-fluoro modified nucleotide
  modified_base 20..21: mod_base = OTHER; note = 2'-O-methyl modified nucleotide
  modified_base 20..21: mod_base = OTHER; note = phosphorothioate linkage
  source 1..21: mol_type = other RNA
tcaacatgacgtacataactt

SEQ ID NO: 845 - RNA, 21 nt, synthetic construct
  misc_feature 1..21: note = Synthetic
  misc_feature 1: note = Nucleotide linked to an inverted abasic cap
  modified_base 2..3: mod_base = OTHER; note = 2'-O-methyl modified nucleotide
  modified_base 5: mod_base = OTHER; note = 2'-O-methyl modified nucleotide
  modified_base 7: mod_base = OTHER; note = 2'-O-methyl modified nucleotide
  modified_base 9: mod_base = OTHER; note = 2'-O-methyl modified nucleotide
  modified_base 11..12: mod_base = OTHER; note = 2'-O-methyl modified nucleotide
  modified_base 14: mod_base = OTHER; note = 2'-O-methyl modified nucleotide
  modified_base 16..17: mod_base = OTHER; note = 2'-O-methyl modified nucleotide
  modified_base 20..21: mod_base = OTHER; note = 2'-O-methyl modified nucleotide
  modified_base 20..21: mod_base = OTHER; note = phosphorothioate linkage
  misc_feature 21: note = Nucleotide linked to an inverted abasic cap
  source 1..21: mol_type = other RNA
gttatgtacgtcatgttgatt

SEQ ID NO: 846 - RNA, 21 nt, synthetic construct
  misc_feature 1..21: note = Synthetic
  misc_feature 1: note = Nucleotide linked to an inverted abasic cap
  modified_base 1..2: mod_base = OTHER; note = 2'-O-methyl modified nucleotide
  modified_base 3: mod_base = OTHER; note = 2'-deoxy-2'-fluoro modified nucleotide
  modified_base 4..6: mod_base = OTHER; note = 2'-O-methyl modified nucleotide
  modified_base 7..8: mod_base = OTHER; note = 2'-deoxy-2'-fluoro modified nucleotide
  modified_base 9: mod_base = OTHER; note = 2'-O-methyl modified nucleotide
  modified_base 10: mod_base = OTHER; note = 2'-deoxy-2'-fluoro modified nucleotide
  modified_base 11: mod_base = OTHER; note = 2'-O-methyl modified nucleotide
  modified_base 12: mod_base = OTHER; note = 2'-deoxy-2'-fluoro modified nucleotide
  modified_base 13: mod_base = OTHER; note = 2'-O-methyl modified nucleotide
  modified_base 14: mod_base = OTHER; note = 2'-deoxy-2'-fluoro modified nucleotide
  modified_base 15: mod_base = OTHER; note = 2'-O-methyl modified nucleotide
  modified_base 16..17: mod_base = OTHER; note = 2'-deoxy-2'-fluoro modified nucleotide
  modified_base 18: mod_base = OTHER; note = 2'-O-methyl modified nucleotide
  modified_base 19: mod_base = OTHER; note = 2'-deoxy-2'-fluoro modified nucleotide
  modified_base 20..21: mod_base = OTHER; note = 2'-O-methyl modified nucleotide
  modified_base 20..21: mod_base = OTHER; note = phosphorothioate linkage
  misc_feature 21: note = Nucleotide linked to an inverted abasic cap
  source 1..21: mol_type = other RNA
aacgggttatgtacgtcattt

SEQ ID NO: 847 - RNA, 21 nt, synthetic construct
  misc_feature 1..21: note = Synthetic
  modified_base 4: mod_base = OTHER; note = 2'-O-methyl modified nucleotide
  modified_base 5: mod_base = OTHER; note = 2'-deoxy-2'-fluoro modified nucleotide
  modified_base 6: mod_base = OTHER; note = 2'-O-methyl modified nucleotide
  modified_base 7: mod_base = OTHER; note = 2'-deoxy-2'-fluoro modified nucleotide
  modified_base 8: mod_base = OTHER; note = 2'-O-methyl modified nucleotide
  modified_base 9: mod_base = OTHER; note = 2'-deoxy-2'-fluoro modified nucleotide
  modified_base 10: mod_base = OTHER; note = 2'-O-methyl modified nucleotide
  modified_base 11: mod_base = OTHER; note = 2'-deoxy-2'-fluoro modified nucleotide
  modified_base 12..13: mod_base = OTHER; note = 2'-O-methyl modified nucleotide
  modified_base 14..16: mod_base = OTHER; note = 2'-deoxy-2'-fluoro modified nucleotide
  modified_base 17: mod_base = OTHER; note = 2'-O-methyl modified nucleotide
  modified_base 18..19: mod_base = OTHER; note = 2'-deoxy-2'-fluoro modified nucleotide
  modified_base 20..21: mod_base = OTHER; note = 2'-O-methyl modified nucleotide
  modified_base 20..21: mod_base = OTHER; note = phosphorothioate linkage
  source 1..21: mol_type = other RNA
atgacgtacataacccgtttt

SEQ ID NO: 848 - RNA, 21 nt, synthetic construct
  misc_feature 1..21: note = Synthetic
  misc_feature 1: note = Nucleotide linked to an inverted abasic cap
  modified_base 1..2: mod_base = OTHER; note = 2'-O-methyl modified nucleotide
  modified_base 4..6: mod_base = OTHER; note = 2'-O-methyl modified nucleotide
  modified_base 9: mod_base = OTHER; note = 2'-O-methyl modified nucleotide
  modified_base 11: mod_base = OTHER; note = 2'-O-methyl modified nucleotide
  modified_base 13: mod_base = OTHER; note = 2'-O-methyl modified nucleotide
  modified_base 15: mod_base = OTHER; note = 2'-O-methyl modified nucleotide
  modified_base 18: mod_base = OTHER; note = 2'-O-methyl modified nucleotide
  modified_base 20..21: mod_base = OTHER; note = 2'-O-methyl modified nucleotide
  modified_base 20..21: mod_base = OTHER; note = phosphorothioate linkage
  misc_feature 21: note = Nucleotide linked to an inverted abasic cap
  source 1..21: mol_type = other RNA
aacgggttatgtacgtcattt

SEQ ID NO: 849 - RNA, 21 nt, synthetic construct
  misc_feature 1..21: note = Synthetic
  modified_base 4..6: mod_base = OTHER; note = 2'-O-methyl modified nucleotide
  modified_base 9: mod_base = OTHER; note = 2'-O-methyl modified nucleotide
  modified_base 12..13: mod_base = OTHER; note = 2'-O-methyl modified nucleotide
  modified_base 15: mod_base = OTHER; note = 2'-O-methyl modified nucleotide
  modified_base 17..18: mod_base = OTHER; note = 2'-O-methyl modified nucleotide
  modified_base 20..21: mod_base = OTHER; note = 2'-O-methyl modified nucleotide
  modified_base 20..21: mod_base = OTHER; note = phosphorothioate linkage
  source 1..21: mol_type = other RNA
tttggattatcaacatgactt

SEQ ID NO: 850 - RNA, 21 nt, synthetic construct
  misc_feature 1..21: note = Synthetic
  modified_base 4..6: mod_base = OTHER; note = 2'-deoxy-2'-fluoro modified nucleotide
  modified_base 7..8: mod_base = OTHER; note = 2'-O-methyl modified nucleotide
  modified_base 9: mod_base = OTHER; note = 2'-deoxy-2'-fluoro modified nucleotide
  modified_base 10..11: mod_base = OTHER; note = 2'-O-methyl modified nucleotide
  modified_base 12..13: mod_base = OTHER; note = 2'-deoxy-2'-fluoro modified nucleotide
  modified_base 14: mod_base = OTHER; note = 2'-O-methyl modified nucleotide
  modified_base 15: mod_base = OTHER; note = 2'-deoxy-2'-fluoro modified nucleotide
  modified_base 16: mod_base = OTHER; note = 2'-O-methyl modified nucleotide
  modified_base 17..18: mod_base = OTHER; note = 2'-deoxy-2'-fluoro modified nucleotide
  modified_base 19..21: mod_base = OTHER; note = 2'-O-methyl modified nucleotide
  modified_base 20..21: mod_base = OTHER; note = phosphorothioate linkage
  source 1..21: mol_type = other RNA
tttggattatcaacatgactt

SEQ ID NO: 851 - RNA, 21 nt, synthetic construct
  misc_feature 1..21: note = Synthetic
  modified_base 4: mod_base = OTHER; note = 2'-deoxy-2'-fluoro modified nucleotide
  modified_base 6: mod_base = OTHER; note = 2'-deoxy-2'-fluoro modified nucleotide
  modified_base 8..9: mod_base = OTHER; note = 2'-deoxy-2'-fluoro modified nucleotide
  modified_base 11: mod_base = OTHER; note = 2'-deoxy-2'-fluoro modified nucleotide
  modified_base 13: mod_base = OTHER; note = 2'-deoxy-2'-fluoro modified nucleotide
  modified_base 15: mod_base = OTHER; note = 2'-deoxy-2'-fluoro modified nucleotide
  modified_base 17..18: mod_base = OTHER; note = 2'-deoxy-2'-fluoro modified nucleotide
  modified_base 20..21: mod_base = OTHER; note = 2'-O-methyl modified nucleotide
  modified_base 20..21: mod_base = OTHER; note = phosphorothioate linkage
  source 1..21: mol_type = other RNA
tcaacatgacgtacataactt

SEQ ID NO: 852 - RNA, 21 nt, synthetic construct
  misc_feature 1..21: note = Synthetic
  misc_feature 1: note = Nucleotide linked to an inverted abasic cap
  modified_base 1: mod_base = OTHER; note = 2'-O-methyl modified nucleotide
  modified_base 4: mod_base = OTHER; note = 2'-O-methyl modified nucleotide
  modified_base 6: mod_base = OTHER; note = 2'-O-methyl modified nucleotide
  modified_base 8: mod_base = OTHER; note = 2'-O-methyl modified nucleotide
  modified_base 10: mod_base = OTHER; note = 2'-O-methyl modified nucleotide
  modified_base 13: mod_base = OTHER; note = 2'-O-methyl modified nucleotide
  modified_base 15: mod_base = OTHER; note = 2'-O-methyl modified nucleotide
  modified_base 18..21: mod_base = OTHER; note = 2'-O-methyl modified nucleotide
  modified_base 20..21: mod_base = OTHER; note = phosphorothioate linkage
  misc_feature 21: note = Nucleotide linked to an inverted abasic cap
  source 1..21: mol_type = other RNA
gttatgtacgtcatgttgatt

SEQ ID NO: 853 - RNA, 21 nt, synthetic construct
  misc_feature 1..21: note = Synthetic
  modified_base 4: mod_base = OTHER; note = 2'-deoxy-2'-fluoro modified nucleotide
  modified_base 6: mod_base = OTHER; note = 2'-deoxy-2'-fluoro modified nucleotide
  modified_base 8: mod_base = OTHER; note = 2'-deoxy-2'-fluoro modified nucleotide
  modified_base 10: mod_base = OTHER; note = 2'-deoxy-2'-fluoro modified nucleotide
  modified_base 12..13: mod_base = OTHER; note = 2'-deoxy-2'-fluoro modified nucleotide
  modified_base 17: mod_base = OTHER; note = 2'-deoxy-2'-fluoro modified nucleotide
  modified_base 20..21: mod_base = OTHER; note = 2'-O-methyl modified nucleotide
  modified_base 20..21: mod_base = OTHER; note = phosphorothioate linkage
  source 1..21: mol_type = other RNA
atgacgtacataacccgtttt

SEQ ID NO: 854 - RNA, 21 nt, synthetic construct
  misc_feature 1..21: note = Synthetic
  modified_base 5: mod_base = OTHER; note = 2'-O-methyl modified nucleotide
  modified_base 7: mod_base = OTHER; note = 2'-O-methyl modified nucleotide
  modified_base 9: mod_base = OTHER; note = 2'-O-methyl modified nucleotide
  modified_base 11: mod_base = OTHER; note = 2'-O-methyl modified nucleotide
  modified_base 15..16: mod_base = OTHER; note = 2'-O-methyl modified nucleotide
  modified_base 18..21: mod_base = OTHER; note = 2'-O-methyl modified nucleotide
  modified_base 20..21: mod_base = OTHER; note = phosphorothioate linkage
  source 1..21: mol_type = other RNA
atgacgtacataacccgtttt

SEQ ID NO: 855 - RNA, 21 nt, synthetic construct
  misc_feature 1..21: note = Synthetic
  misc_feature 1: note = Nucleotide linked to an inverted abasic cap
  modified_base 3: mod_base = OTHER; note = 2'-O-methyl modified nucleotide
  modified_base 7..8: mod_base = OTHER; note = 2'-O-methyl modified nucleotide
  modified_base 10: mod_base = OTHER; note = 2'-O-methyl modified nucleotide
  modified_base 12: mod_base = OTHER; note = 2'-O-methyl modified nucleotide
  modified_base 14: mod_base = OTHER; note = 2'-O-methyl modified nucleotide
  modified_base 16..17: mod_base = OTHER; note = 2'-O-methyl modified nucleotide
  modified_base 19..21: mod_base = OTHER; note = 2'-O-methyl modified nucleotide
  modified_base 20..21: mod_base = OTHER; note = phosphorothioate linkage
  misc_feature 21: note = Nucleotide linked to an inverted abasic cap
  source 1..21: mol_type = other RNA
aacgggttatgtacgtcattt

SEQ ID NO: 856 - RNA, 21 nt, synthetic construct
  misc_feature 1..21: note = Synthetic
  misc_feature 1: note = Nucleotide linked to an inverted abasic cap
  modified_base 1: mod_base = OTHER; note = 2'-O-methyl modified nucleotide
  modified_base 4: mod_base = OTHER; note = 2'-O-methyl modified nucleotide
  modified_base 6: mod_base = OTHER; note = 2'-O-methyl modified nucleotide
  modified_base 9..10: mod_base = OTHER; note = 2'-O-methyl modified nucleotide
  modified_base 12..13: mod_base = OTHER; note = 2'-O-methyl modified nucleotide
  modified_base 17..21: mod_base = OTHER; note = 2'-O-methyl modified nucleotide
  modified_base 20..21: mod_base = OTHER; note = phosphorothioate linkage
  misc_feature 21: note = Nucleotide linked to an inverted abasic cap
  source 1..21: mol_type = other RNA
gtcatgttgataatccaaatt

SEQ ID NO: 857 - RNA, 21 nt, synthetic construct
  misc_feature 1..21: note = Synthetic
  modified_base 7..8: mod_base = OTHER; note = 2'-O-methyl modified nucleotide
  modified_base 10..11: mod_base = OTHER; note = 2'-O-methyl modified nucleotide
  modified_base 16: mod_base = OTHER; note = 2'-O-methyl modified nucleotide
  modified_base 19..21: mod_base = OTHER; note = 2'-O-methyl modified nucleotide
  modified_base 20..21: mod_base = OTHER; note = phosphorothioate linkage
  source 1..21: mol_type = other RNA
tttggattatcaacatgactt

SEQ ID NO: 858 - DNA, 21 bp, synthetic construct
  misc_feature 1..21: note = Synthetic
  misc_feature 1..19: note = ribonucleotide unmodified or modified as described for this sequence
  misc_feature 1: note = Nucleotide linked to an inverted abasic cap
  modified_base 2..3: mod_base = OTHER; note = 2'-deoxy-2'-fluoro modified nucleotide
  modified_base 5: mod_base = OTHER; note = 2'-deoxy-2'-fluoro modified nucleotide
  modified_base 7..8: mod_base = OTHER; note = 2'-deoxy-2'-fluoro modified nucleotide
  modified_base 11: mod_base = OTHER; note = 2'-deoxy-2'-fluoro modified nucleotide
  modified_base 14..16: mod_base = OTHER; note = 2'-deoxy-2'-fluoro modified nucleotide
  modified_base 20..21: mod_base = OTHER; note = phosphorothioate linkage
  misc_feature 21: note = Nucleotide linked to an inverted abasic cap
  source 1..21: mol_type = other DNA
  misc_feature 1: note = DNA
  misc_feature 2..3: note = RNA
  misc_feature 4: note = DNA
  misc_feature 5: note = RNA
  misc_feature 6: note = DNA
  misc_feature 7..8: note = RNA
  misc_feature 9..10: note = DNA
  misc_feature 11: note = RNA
  misc_feature 12..13: note = DNA
  misc_feature 14..16: note = RNA
  misc_feature 17..21: note = DNA
gtcatgttgataatccaaatt

SEQ ID NO: 859 - RNA, 21 nt, synthetic construct
  misc_feature 1..21: note = Synthetic
  modified_base 4..6: mod_base = OTHER; note = 2'-O-methyl modified nucleotide
  modified_base 7..8: mod_base = OTHER; note = 2'-deoxy-2'-fluoro modified nucleotide
  modified_base 9: mod_base = OTHER; note = 2'-O-methyl modified nucleotide
  modified_base 10..11: mod_base = OTHER; note = 2'-deoxy-2'-fluoro modified nucleotide
  modified_base 12..13: mod_base = OTHER; note = 2'-O-methyl modified nucleotide
  modified_base 14: mod_base = OTHER; note = 2'-deoxy-2'-fluoro modified nucleotide
  modified_base 15: mod_base = OTHER; note = 2'-O-methyl modified nucleotide
  modified_base 16: mod_base = OTHER; note = 2'-deoxy-2'-fluoro modified nucleotide
  modified_base 17..18: mod_base = OTHER; note = 2'-O-methyl modified nucleotide
  modified_base 19: mod_base = OTHER; note = 2'-deoxy-2'-fluoro modified nucleotide
  modified_base 20..21: mod_base = OTHER; note = 2'-O-methyl modified nucleotide
  modified_base 20..21: mod_base = OTHER; note = phosphorothioate linkage
  source 1..21: mol_type = other RNA
tttggattatcaacatgactt

SEQ ID NO: 860 - RNA, 21 nt, synthetic construct
  misc_feature 1..21: note = Synthetic
  misc_feature 1: note = Nucleotide linked to an inverted abasic cap
  modified_base 20..21: mod_base = OTHER; note = 2'-O-methyl modified nucleotide
  modified_base 20..21: mod_base = OTHER; note = phosphorothioate linkage
  misc_feature 21: note = Nucleotide linked to an inverted abasic cap
  source 1..21: mol_type = other RNA
gtcatgttgataatccaaatt

SEQ ID NO: 861 - RNA, 21 nt, synthetic construct
  misc_feature 1..21: note = Synthetic
  modified_base 20..21: mod_base = OTHER; note = 2'-O-methyl modified nucleotide
  modified_base 20..21: mod_base = OTHER; note = phosphorothioate linkage
  source 1..21: mol_type = other RNA
tttggattatcaacatgactt

SEQ ID NO: 862 - RNA, 21 nt, synthetic construct
  misc_feature 1..21: note = Synthetic
  modified_base 5: mod_base = OTHER; note = 2'-O-methyl modified nucleotide
  modified_base 7: mod_base = OTHER; note = 2'-O-methyl modified nucleotide
  modified_base 10: mod_base = OTHER; note = 2'-O-methyl modified nucleotide
  modified_base 12: mod_base = OTHER; note = 2'-O-methyl modified nucleotide
  modified_base 16: mod_base = OTHER; note = 2'-O-methyl modified nucleotide
  modified_base 19..21: mod_base = OTHER; note = 2'-O-methyl modified nucleotide
  modified_base 20..21: mod_base = OTHER; note = phosphorothioate linkage
  source 1..21: mol_type = other RNA
tcaacatgacgtacataactt

SEQ ID NO: 863 - RNA, 21 nt, synthetic construct
  misc_feature 1..21: note = Synthetic
  modified_base 4: mod_base = OTHER; note = 2'-O-methyl modified nucleotide
  modified_base 6: mod_base = OTHER; note = 2'-O-methyl modified nucleotide
  modified_base 8..9: mod_base = OTHER; note = 2'-O-methyl modified nucleotide
  modified_base 11: mod_base = OTHER; note = 2'-O-methyl modified nucleotide
  modified_base 13: mod_base = OTHER; note = 2'-O-methyl modified nucleotide
  modified_base 15: mod_base = OTHER; note = 2'-O-methyl modified nucleotide
  modified_base 17..18: mod_base = OTHER; note = 2'-O-methyl modified nucleotide
  modified_base 20..21: mod_base = OTHER; note = 2'-O-methyl modified nucleotide
  modified_base 20..21: mod_base = OTHER; note = phosphorothioate linkage
  source 1..21: mol_type = other RNA
tcaacatgacgtacataactt

SEQ ID NO: 864 - RNA, 21 nt, synthetic construct
  misc_feature 1..21: note = Synthetic
  modified_base 4: mod_base = OTHER; note = 2'-deoxy-2'-fluoro modified nucleotide
  modified_base 5: mod_base = OTHER; note = 2'-O-methyl modified nucleotide
  modified_base 6: mod_base = OTHER; note = 2'-deoxy-2'-fluoro modified nucleotide
  modified_base 7: mod_base = OTHER; note = 2'-O-methyl modified nucleotide
  modified_base 8..9: mod_base = OTHER; note = 2'-deoxy-2'-fluoro modified nucleotide
  modified_base 10: mod_base = OTHER; note = 2'-O-methyl modified nucleotide
  modified_base 11: mod_base = OTHER; note = 2'-deoxy-2'-fluoro modified nucleotide
  modified_base 12: mod_base = OTHER; note = 2'-O-methyl modified nucleotide
  modified_base 13: mod_base = OTHER; note = 2'-deoxy-2'-fluoro modified nucleotide
  modified_base 14: mod_base = OTHER; note = 2'-O-methyl modified nucleotide
  modified_base 15: mod_base = OTHER; note = 2'-deoxy-2'-fluoro modified nucleotide
  modified_base 16: mod_base = OTHER; note = 2'-O-methyl modified nucleotide
  modified_base 17..18: mod_base = OTHER; note = 2'-deoxy-2'-fluoro modified nucleotide
  modified_base 19..21: mod_base = OTHER; note = 2'-O-methyl modified nucleotide
  modified_base 20..21: mod_base = OTHER; note = phosphorothioate linkage
  source 1..21: mol_type = other RNA
tcaacatgacgtacataactt

SEQ ID NO: 865 - RNA, 21 nt, synthetic construct
  misc_feature 1..21: note = Synthetic
  modified_base 4: mod_base = OTHER; note = 2'-O-methyl modified nucleotide
  modified_base 6: mod_base = OTHER; note = 2'-O-methyl modified nucleotide
  modified_base 8: mod_base = OTHER; note = 2'-O-methyl modified nucleotide
  modified_base 10: mod_base = OTHER; note = 2'-O-methyl modified nucleotide
  modified_base 12..13: mod_base = OTHER; note = 2'-O-methyl modified nucleotide
  modified_base 17: mod_base = OTHER; note = 2'-O-methyl modified nucleotide
  modified_base 20..21: mod_base = OTHER; note = 2'-O-methyl modified nucleotide
  modified_base 20..21: mod_base = OTHER; note = phosphorothioate linkage
  source 1..21: mol_type = other RNA
atgacgtacataacccgtttt

SEQ ID NO: 866 - DNA, 21 bp, synthetic construct
  misc_feature 1..21: note = Synthetic
  misc_feature 1..19: note = ribonucleotide unmodified or modified as described for this sequence
  misc_feature 1: note = Nucleotide linked to an inverted abasic cap
  modified_base 3: mod_base = OTHER; note = 2'-deoxy-2'-fluoro modified nucleotide
  modified_base 7..8: mod_base = OTHER; note = 2'-deoxy-2'-fluoro modified nucleotide
  modified_base 10: mod_base = OTHER; note = 2'-deoxy-2'-fluoro modified nucleotide
  modified_base 12: mod_base = OTHER; note = 2'-deoxy-2'-fluoro modified nucleotide
  modified_base 14: mod_base = OTHER; note = 2'-deoxy-2'-fluoro modified nucleotide
  modified_base 16..17: mod_base = OTHER; note = 2'-deoxy-2'-fluoro modified nucleotide
  modified_base 19: mod_base = OTHER; note = 2'-deoxy-2'-fluoro modified nucleotide
  modified_base 20..21: mod_base = OTHER; note = phosphorothioate linkage
  misc_feature 21: note = Nucleotide linked to an inverted abasic cap
  source 1..21: mol_type = other DNA
  misc_feature 1..2: note = DNA
  misc_feature 3: note = RNA
  misc_feature 4..6: note = DNA
  misc_feature 7..8: note = RNA
  misc_feature 9: note = DNA
  misc_feature 10: note = RNA
  misc_feature 11: note = DNA
  misc_feature 12: note = RNA
  misc_feature 13: note = DNA
  misc_feature 14: note = RNA
  misc_feature 15: note = DNA
  misc_feature 16..17: note = RNA
  misc_feature 18: note = DNA
  misc_feature 19: note = RNA
  misc_feature 20..21: note = DNA
aacgggttatgtacgtcattt

SEQ ID NO: 867 - RNA, 21 nt, synthetic construct
  misc_feature 1..21: note = Synthetic
  misc_feature 1: note = Nucleotide linked to an inverted abasic cap
  modified_base 2..3: mod_base = OTHER; note = 2'-deoxy-2'-fluoro modified nucleotide
  modified_base 5: mod_base = OTHER; note = 2'-deoxy-2'-fluoro modified nucleotide
  modified_base 7: mod_base = OTHER; note = 2'-deoxy-2'-fluoro modified nucleotide
  modified_base 9: mod_base = OTHER; note = 2'-deoxy-2'-fluoro modified nucleotide
  modified_base 11..12: mod_base = OTHER; note = 2'-deoxy-2'-fluoro modified nucleotide
  modified_base 14: mod_base = OTHER; note = 2'-deoxy-2'-fluoro modified nucleotide
  modified_base 16..17: mod_base = OTHER; note = 2'-deoxy-2'-fluoro modified nucleotide
  modified_base 20..21: mod_base = OTHER; note = 2'-O-methyl modified nucleotide
  modified_base 20..21: mod_base = OTHER; note = phosphorothioate linkage
  misc_feature 21: note = Nucleotide linked to an inverted abasic cap
  source 1..21: mol_type = other RNA
gttatgtacgtcatgttgatt

SEQ ID NO: 868 - RNA, 21 nt, synthetic construct
  misc_feature 1..21: note = Synthetic
  modified_base 4: mod_base = OTHER; note = 2'-deoxy-2'-fluoro modified nucleotide
  modified_base 5: mod_base = OTHER; note = 2'-O-methyl modified nucleotide
  modified_base 6: mod_base = OTHER; note = 2'-deoxy-2'-fluoro modified nucleotide
  modified_base 7: mod_base = OTHER; note = 2'-O-methyl modified nucleotide
  modified_base 8: mod_base = OTHER; note = 2'-deoxy-2'-fluoro modified nucleotide
  modified_base 9: mod_base = OTHER; note = 2'-O-methyl modified nucleotide
  modified_base 10: mod_base = OTHER; note = 2'-deoxy-2'-fluoro modified nucleotide
  modified_base 11: mod_base = OTHER; note = 2'-O-methyl modified nucleotide
  modified_base 12..13: mod_base = OTHER; note = 2'-deoxy-2'-fluoro modified nucleotide
  modified_base 14..16: mod_base = OTHER; note = 2'-O-methyl modified nucleotide
  modified_base 17: mod_base = OTHER; note = 2'-deoxy-2'-fluoro modified nucleotide
  modified_base 18..21: mod_base = OTHER; note = 2'-O-methyl modified nucleotide
  modified_base 20..21: mod_base = OTHER; note = phosphorothioate linkage
  source 1..21: mol_type = other RNA
atgacgtacataacccgtttt

SEQ ID NO: 869 - RNA, 21 nt, synthetic construct
  misc_feature 1..21: note = Synthetic
  modified_base 2: mod_base = OTHER; note = 2'-deoxy-2'-fluoro modified nucleotide
  modified_base 5: mod_base = OTHER; note = 2'-deoxy-2'-fluoro modified nucleotide
  modified_base 7: mod_base = OTHER; note = 2'-deoxy-2'-fluoro modified nucleotide
  modified_base 9: mod_base = OTHER; note = 2'-deoxy-2'-fluoro modified nucleotide
  modified_base 11: mod_base = OTHER; note = 2'-deoxy-2'-fluoro modified nucleotide
  modified_base 14..16: mod_base = OTHER; note = 2'-deoxy-2'-fluoro modified nucleotide
  modified_base 18..19: mod_base = OTHER; note = 2'-deoxy-2'-fluoro modified nucleotide
  modified_base 20..21: mod_base = OTHER; note = 2'-O-methyl modified nucleotide
  modified_base 20..21: mod_base = OTHER; note = phosphorothioate linkage
  source 1..21: mol_type = other RNA
atgacgtacataacccgtttt

SEQ ID NO: 870 - DNA, 21 bp, synthetic construct
  misc_feature 1..21: note = Synthetic
  misc_feature 1..19: note = ribonucleotide unmodified or modified as described for this sequence
  misc_feature 1: note = Nucleotide linked to an inverted abasic cap
  modified_base 2..3: mod_base = OTHER; note = 2'-deoxy-2'-fluoro modified nucleotide
  modified_base 5: mod_base = OTHER; note = 2'-deoxy-2'-fluoro modified nucleotide
  modified_base 7: mod_base = OTHER; note = 2'-deoxy-2'-fluoro modified nucleotide
  modified_base 9: mod_base = OTHER; note = 2'-deoxy-2'-fluoro modified nucleotide
  modified_base 11..12: mod_base = OTHER; note = 2'-deoxy-2'-fluoro modified nucleotide
  modified_base 14: mod_base = OTHER; note = 2'-deoxy-2'-fluoro modified nucleotide
  modified_base 16..17: mod_base = OTHER; note = 2'-deoxy-2'-fluoro modified nucleotide
  modified_base 20..21: mod_base = OTHER; note = phosphorothioate linkage
  misc_feature 21: note = Nucleotide linked to an inverted abasic cap
  source 1..21: mol_type = other DNA
  misc_feature 1: note = DNA
  misc_feature 2..3: note = RNA
  misc_feature 4: note = DNA
  misc_feature 5: note = RNA
  misc_feature 6: note = DNA
  misc_feature 7: note = RNA
  misc_feature 8: note = DNA
  misc_feature 9: note = RNA
  misc_feature 10: note = DNA
  misc_feature 11..12: note = RNA
  misc_feature 13: note = DNA
  misc_feature 14: note = RNA
  misc_feature 15: note = DNA
  misc_feature 16..17: note = RNA
  misc_feature 18..21: note = DNA
gttatgtacgtcatgttgatt

SEQ ID NO: 871 - DNA, 21 bp, synthetic construct
  misc_feature 1..21: note = Synthetic
  misc_feature 1: note = Nucleotide linked to an inverted abasic cap
  modified_base 2..3: mod_base = OTHER; note = 2'-deoxy-2'-fluoro modified nucleotide
  modified_base 5: mod_base = OTHER; note = 2'-deoxy-2'-fluoro modified nucleotide
  modified_base 7..8: mod_base = OTHER; note = 2'-deoxy-2'-fluoro modified nucleotide
  modified_base 11: mod_base = OTHER; note = 2'-deoxy-2'-fluoro modified nucleotide
  modified_base 14..16: mod_base = OTHER; note = 2'-deoxy-2'-fluoro modified nucleotide
  modified_base 20..21: mod_base = OTHER; note = 2'-O-methyl modified nucleotide
  modified_base 20..21: mod_base = OTHER; note = phosphorothioate linkage
  misc_feature 21: note = Nucleotide linked to an inverted abasic cap
  source 1..21: mol_type = other DNA
  misc_feature 1: note = DNA
  misc_feature 2..3: note = RNA
  misc_feature 4: note = DNA
  misc_feature 5: note = RNA
  misc_feature 6: note = DNA
  misc_feature 7..8: note = RNA
  misc_feature 9..10: note = DNA
  misc_feature 11: note = RNA
  misc_feature 12..13: note = DNA
  misc_feature 14..16: note = RNA
  misc_feature 17..19: note = DNA
  misc_feature 20..21: note = RNA
gtcatgttgataatccaaatt

SEQ ID NO: 872 - RNA, 21 nt, synthetic construct
  misc_feature 1..21: note = Synthetic
  misc_feature 1: note = Nucleotide linked to an inverted abasic cap
  modified_base 20..21: mod_base = OTHER; note = 2'-O-methyl modified nucleotide
  modified_base 20..21: mod_base = OTHER; note = phosphorothioate linkage
  misc_feature 21: note = Nucleotide linked to an inverted abasic cap
  source 1..21: mol_type = other RNA
aacgggttatgtacgtcattt

SEQ ID NO: 873 - RNA, 21 nt, synthetic construct
  misc_feature 1..21: note = Synthetic
  modified_base 20..21: mod_base = OTHER; note = 2'-O-methyl modified nucleotide
  modified_base 20..21: mod_base = OTHER; note = phosphorothioate linkage
  source 1..21: mol_type = other RNA
atgacgtacataacccgtttt

SEQ ID NO: 874 - DNA, 21 bp, synthetic construct
  misc_feature 1..21: note = Synthetic
  misc_feature 1: note = Nucleotide linked to an inverted abasic cap
  modified_base 3: mod_base = OTHER; note = 2'-deoxy-2'-fluoro modified nucleotide
  modified_base 7..8: mod_base = OTHER; note = 2'-deoxy-2'-fluoro modified nucleotide
  modified_base 10: mod_base = OTHER; note = 2'-deoxy-2'-fluoro modified nucleotide
  modified_base 12: mod_base = OTHER; note = 2'-deoxy-2'-fluoro modified nucleotide
  modified_base 14: mod_base = OTHER; note = 2'-deoxy-2'-fluoro modified nucleotide
  modified_base 16..17: mod_base = OTHER; note = 2'-deoxy-2'-fluoro modified nucleotide
  modified_base 19: mod_base = OTHER; note = 2'-deoxy-2'-fluoro modified nucleotide
  modified_base 20..21: mod_base = OTHER; note = 2'-O-methyl modified nucleotide
  modified_base 20..21: mod_base = OTHER; note = phosphorothioate linkage
  misc_feature 21: note = Nucleotide linked to an inverted abasic cap
  source 1..21: mol_type = other DNA
  misc_feature 1..2: note = DNA
  misc_feature 3: note = RNA
  misc_feature 4..6: note = DNA
  misc_feature 7..8: note = RNA
  misc_feature 9: note = DNA
  misc_feature 10: note = RNA
  misc_feature 11: note = DNA
  misc_feature 12: note = RNA
  misc_feature 13: note = DNA
  misc_feature 14: note = RNA
  misc_feature 15: note = DNA
  misc_feature 16..17: note = RNA
  misc_feature 18: note = DNA
  misc_feature 19..21: note = RNA
aacgggttatgtacgtcattt

SEQ ID NO: 875 - RNA, 21 nt, synthetic construct
  misc_feature 1..21: note = Synthetic
  misc_feature 1: note = Nucleotide linked to an inverted abasic cap
  modified_base 3: mod_base = OTHER; note = 2'-deoxy-2'-fluoro modified nucleotide
  modified_base 7..8: mod_base = OTHER; note = 2'-deoxy-2'-fluoro modified nucleotide
  modified_base 10: mod_base = OTHER; note = 2'-deoxy-2'-fluoro modified nucleotide
  modified_base 12: mod_base = OTHER; note = 2'-deoxy-2'-fluoro modified nucleotide
  modified_base 14: mod_base = OTHER; note = 2'-deoxy-2'-fluoro modified nucleotide
  modified_base 16..17: mod_base = OTHER; note = 2'-deoxy-2'-fluoro modified nucleotide
  modified_base 19: mod_base = OTHER; note = 2'-deoxy-2'-fluoro modified nucleotide
  modified_base 20..21: mod_base = OTHER; note = 2'-O-methyl modified nucleotide
  modified_base 20..21: mod_base = OTHER; note = phosphorothioate linkage
  misc_feature 21: note = Nucleotide linked to an inverted abasic cap
  source 1..21: mol_type = other RNA
aacgggttatgtacgtcattt

SEQ ID NO: 876 - RNA, 21 nt, synthetic construct
  misc_feature 1..21: note = Synthetic
  misc_feature 1: note = Nucleotide linked to an inverted abasic cap
  modified_base 2..3: mod_base = OTHER; note = 2'-deoxy-2'-fluoro modified nucleotide
  modified_base 5: mod_base = OTHER; note = 2'-deoxy-2'-fluoro modified nucleotide
  modified_base 7..8: mod_base = OTHER; note = 2'-deoxy-2'-fluoro modified nucleotide
  modified_base 11: mod_base = OTHER; note = 2'-deoxy-2'-fluoro modified nucleotide
  modified_base 14..16: mod_base = OTHER; note = 2'-deoxy-2'-fluoro modified nucleotide
  modified_base 20..21: mod_base = OTHER; note = 2'-O-methyl modified nucleotide
  modified_base 20..21: mod_base = OTHER; note = phosphorothioate linkage
  misc_feature 21: note = Nucleotide linked to an inverted abasic cap
  source 1..21: mol_type = other RNA
gtcatgttgataatccaaatt

SEQ ID NO: 877 - DNA, 21 bp, synthetic construct
  misc_feature 1..21: note = Synthetic
  misc_feature 1: note = Nucleotide linked to an inverted abasic cap
  modified_base 2..3: mod_base = OTHER; note = 2'-deoxy-2'-fluoro modified nucleotide
  modified_base 5: mod_base = OTHER; note = 2'-deoxy-2'-fluoro modified nucleotide
  modified_base 7: mod_base = OTHER; note = 2'-deoxy-2'-fluoro modified nucleotide
  modified_base 9: mod_base = OTHER; note = 2'-deoxy-2'-fluoro modified nucleotide
  modified_base 11..12: mod_base = OTHER; note = 2'-deoxy-2'-fluoro modified nucleotide
  modified_base 14: mod_base = OTHER; note = 2'-deoxy-2'-fluoro modified nucleotide
  modified_base 16..17: mod_base = OTHER; note = 2'-deoxy-2'-fluoro modified nucleotide
  modified_base 20..21: mod_base = OTHER; note = 2'-O-methyl modified nucleotide
  modified_base 20..21: mod_base = OTHER; note = phosphorothioate linkage
  misc_feature 21: note = Nucleotide linked to an inverted abasic cap
  source 1..21: mol_type = other DNA
  misc_feature 1: note = DNA
  misc_feature 2..3: note = RNA
  misc_feature 4: note = DNA
  misc_feature 5: note = RNA
  misc_feature 6: note = DNA
  misc_feature 7: note = RNA
  misc_feature 8: note = DNA
  misc_feature 9: note = RNA
  misc_feature 10: note = DNA
  misc_feature 11..12: note = RNA
  misc_feature 13: note = DNA
  misc_feature 14: note = RNA
  misc_feature 15: note = DNA
  misc_feature 16..17: note = RNA
  misc_feature 18..19: note = DNA
  misc_feature 20..21: note = RNA
gttatgtacgtcatgttgatt

SEQ ID NO: 878 - RNA, 21 nt, synthetic construct
  misc_feature 1..21: note = Synthetic
  misc_feature 1: note = Nucleotide linked to an inverted abasic cap
  modified_base 20..21: mod_base = OTHER; note = 2'-O-methyl modified nucleotide
  modified_base 20..21: mod_base = OTHER; note = phosphorothioate linkage
  misc_feature 21: note = Nucleotide linked to an inverted abasic cap
  source 1..21: mol_type = other RNA
gttatgtacgtcatgttgatt

SEQ ID NO: 879 - RNA, 21 nt, synthetic construct
  misc_feature 1..21: note = Synthetic
  modified_base 20..21: mod_base = OTHER; note = 2'-O-methyl modified nucleotide
  modified_base 20..21: mod_base = OTHER; note = phosphorothioate linkage
  source 1..21: mol_type = other RNA
tcaacatgacgtacataactt

SEQ ID NO: 880 - RNA, 19 nt, synthetic construct
  misc_feature 1..19: note = Synthetic
  source 1..19: mol_type = other RNA
tatatacatgtcacacatc

SEQ ID NO: 881 - RNA, 19 nt, synthetic construct
  misc_feature 1..19: note = Synthetic
  source 1..19: mol_type = other RNA
tcaacatgacgtacataac

SEQ ID NO: 882 - RNA, 19 nt, synthetic construct
  misc_feature 1..19: note = Synthetic
  source 1..19: mol_type = other RNA
tttggattatcaacatgac

SEQ ID NO: 883 - RNA, 19 nt, synthetic construct
  misc_feature 1..19: note = Synthetic
  source 1..19: mol_type = other RNA
taatatatacatgtcacac

SEQ ID NO: 884 - RNA, 19 nt, synthetic construct
  misc_feature 1..19: note = Synthetic
  source 1..19: mol_type = other RNA
tccatttggattatcaaca

SEQ ID NO: 885 - RNA, 19 nt, synthetic construct
  misc_feature 1..19: note = Synthetic
  source 1..19: mol_type = other RNA
atgacgtacataacccgtt

SEQ ID NO: 886 - RNA, 19 nt, synthetic construct
  misc_feature 1..19: note = Synthetic
  source 1..19: mol_type = other RNA
atgtcacacatcttccatc

SEQ ID NO: 887 - RNA, 19 nt, synthetic construct
  misc_feature 1..19: note = Synthetic
  source 1..19: mol_type = other RNA
aatatatacatgtcacaca

SEQ ID NO: 888 - RNA, 19 nt, synthetic construct
  misc_feature 1..19: note = Synthetic
  source 1..19: mol_type = other RNA
tacatgtcacacatcttcc

SEQ ID NO: 889 - RNA, 19 nt, synthetic construct
  misc_feature 1..19: note = Synthetic
  source 1..19: mol_type = other RNA
ttaagataatatatacatg

SEQ ID NO: 890 - RNA, 19 nt, synthetic construct
  misc_feature 1..19: note = Synthetic
  source 1..19: mol_type = other RNA
tctccatttggattatcaa

SEQ ID NO: 891 - RNA, 19 nt, synthetic construct
  misc_feature 1..19: note = Synthetic
  source 1..19: mol_type = other RNA
tggattatcaacatgacgt

SEQ ID NO: 892 - RNA, 19 nt, synthetic construct
  misc_feature 1..19: note = Synthetic
  source 1..19: mol_type = other RNA
acatgtcacacatcttcca

SEQ ID NO: 893 - RNA, 19 nt, synthetic construct
  misc_feature 1..19: note = Synthetic
  source 1..19: mol_type = other RNA
taacaagcaaccatggctt

SEQ ID NO: 894 - RNA, 19 nt, synthetic construct
  misc_feature 1..19: note = Synthetic
  source 1..19: mol_type = other RNA
tacataacccgttccattg

SEQ ID NO: 895 - RNA, 19 nt, synthetic construct
  misc_feature 1..19: note = Synthetic
  source 1..19: mol_type = other RNA
aaaggctctagaagacgtc

SEQ ID NO: 896 - RNA, 19 nt, synthetic construct
  misc_feature 1..19: note = Synthetic
  source 1..19: mol_type = other RNA
aagataatatatacatgtc

SEQ ID NO: 897 - RNA, 19 nt, synthetic construct
  misc_feature 1..19: note = Synthetic
  source 1..19: mol_type = other RNA
acttcatgagggttgcgac

SEQ ID NO: 898 - RNA, 19 nt, synthetic construct
  misc_feature 1..19: note = Synthetic
  source 1..19: mol_type = other RNA
ggattatcaacatgacgta

SEQ ID NO: 899 - RNA, 19 nt, synthetic construct
  misc_feature 1..19: note = Synthetic
  source 1..19: mol_type = other RNA
aacatgacgtacataaccc

SEQ ID NO: 900 - RNA, 19 nt, synthetic construct
  misc_feature 1..19: note = Synthetic
  source 1..19: mol_type = other RNA
aaggtttattgagttcaac

SEQ ID NO: 901 - RNA, 19 nt, synthetic construct
  misc_feature 1..19: note = Synthetic
  source 1..19: mol_type = other RNA
atacatgtcacacatcttc

SEQ ID NO: 902 - RNA, 19 nt, synthetic construct
  misc_feature 1..19: note = Synthetic
  source 1..19: mol_type = other RNA
aagcaaccatggctttcgt

SEQ ID NO: 903 - RNA, 19 nt, synthetic construct
  misc_feature 1..19: note = Synthetic
  source 1..19: mol_type = other RNA
tattaagataatatataca

SEQ ID NO: 904 - RNA, 19 nt, synthetic construct
  misc_feature 1..19: note = Synthetic
  source 1..19: mol_type = other RNA
aataccaaacagttattgc

SEQ ID NO: 905 - RNA, 19 nt, synthetic construct
  misc_feature 1..19: note = Synthetic
  source 1..19: mol_type = other RNA
tttgggttcaatgtcagca

SEQ ID NO: 906 - RNA, 19 nt, synthetic construct
  misc_feature 1..19: note = Synthetic
  source 1..19: mol_type = other RNA
caagcaaccatggctttcg

SEQ ID NO: 907 - RNA, 19 nt, synthetic construct
  misc_feature 1..19: note = Synthetic
  source 1..19: mol_type = other RNA
aattcgaagtatacctcca

SEQ ID NO: 908 - RNA, 19 nt, synthetic construct
  misc_feature 1..19: note = Synthetic
  source 1..19: mol_type = other RNA
taacccgttccattgcccg

SEQ ID NO: 909 - RNA, 19 nt, synthetic construct
  misc_feature 1..19: note = Synthetic
  source 1..19: mol_type = other RNA
ataacaagcaaccatggct

SEQ ID NO: 910 - RNA, 19 nt, synthetic construct
  misc_feature 1..19: note = Synthetic
  source 1..19: mol_type = other RNA
tacttcatgagggttgcga

SEQ ID NO: 911 - RNA, 19 nt, synthetic construct
  misc_feature 1..19: note = Synthetic
  source 1..19: mol_type = other RNA
tattgctggatcaaaggct

SEQ ID NO: 912 - RNA, 19 nt, synthetic construct
  misc_feature 1..19: note = Synthetic
  source 1..19: mol_type = other RNA
atcaaatttgggttcaatg

SEQ ID NO: 913 - RNA, 19 nt, synthetic construct
  misc_feature 1..19: note = Synthetic
  source 1..19: mol_type = other RNA
ttaccttggcatcccagtc

SEQ ID NO: 914 - RNA, 19 nt, synthetic construct
  misc_feature 1..19: note = Synthetic
  source 1..19: mol_type = other RNA
ctcatctgcatcaaaatac

SEQ ID NO: 915 - RNA, 19 nt, synthetic construct
  misc_feature 1..19: note = Synthetic
  source 1..19: mol_type = other RNA
ttgggttcaatgtcagcaa

SEQ ID NO: 916 - RNA, 19 nt, synthetic construct
  misc_feature 1..19: note = Synthetic
  source 1..19: mol_type = other RNA
ttgagttcaaccctcacac

SEQ ID NO: 917 - RNA, 19 nt, synthetic construct
  misc_feature 1..19: note = Synthetic
  source 1..19: mol_type = other RNA
acatgacgtacataacccg

SEQ ID NO: 918 - RNA, 19 nt, synthetic construct
  misc_feature 1..19: note = Synthetic
  source 1..19: mol_type = other RNA
ttggattatcaacatgacg

SEQ ID NO: 919 - RNA, 19 nt, synthetic construct
  misc_feature 1..19: note = Synthetic
  source 1..19: mol_type = other RNA
tcatgcagtacaaagtcac

SEQ ID NO: 920 - RNA, 19 nt, synthetic construct
  misc_feature 1..19: note = Synthetic
  source 1..19: mol_type = other RNA
gtatacctccacttacctt

SEQ ID NO: 921 - RNA, 19 nt, synthetic construct
  misc_feature 1..19: note = Synthetic
  source 1..19: mol_type = other RNA
ttattgcgtaccttgtagc

SEQ ID NO: 922 - RNA, 19 nt, synthetic construct
  misc_feature 1..19: note = Synthetic
  source 1..19: mol_type = other RNA
agttcaaccctcacacctt

SEQ ID NO: 923 - RNA, 19 nt, synthetic construct
  misc_feature 1..19: note = Synthetic
  source 1..19: mol_type = other RNA
tatcccaaattcaaacttg

SEQ ID NO: 924 - RNA, 19 nt, synthetic construct
  misc_feature 1..19: note = Synthetic
  source 1..19: mol_type = other RNA
tgtacttcatgagggttgc

SEQ ID NO: 925 - RNA, 19 nt, synthetic construct
  misc_feature 1..19: note = Synthetic
  source 1..19: mol_type = other RNA
agtctatcaaatttgggtt

SEQ ID NO: 926 - RNA, 19 nt, synthetic construct
  misc_feature 1..19: note = Synthetic
  source 1..19: mol_type = other RNA
ataccaaacagttattgcg

SEQ ID NO: 927 - RNA, 19 nt, synthetic construct
  misc_feature 1..19: note = Synthetic
  source 1..19: mol_type = other RNA
tagctcgtgctctctcatc

SEQ ID NO: 928 - RNA, 19 nt, synthetic construct
  misc_feature 1..19: note = Synthetic
  source 1..19: mol_type = other RNA
atcaacatgacgtacataa

SEQ ID NO: 929 - RNA, 19 nt, synthetic construct
  misc_feature 1..19: note = Synthetic
  source 1..19: mol_type = other RNA
tactttagctcgtgctctc

SEQ ID NO: 930 - RNA, 19 nt, synthetic construct
  misc_feature 1..19: note = Synthetic
  source 1..19: mol_type = other RNA
gctggttgtacttcatgag

SEQ ID NO: 931 - RNA, 19 nt, synthetic construct
  misc_feature 1..19: note = Synthetic
  source 1..19: mol_type = other RNA
attgcgtaccttgtagcat

SEQ ID NO: 932 - RNA, 19 nt, synthetic construct
  misc_feature 1..19: note = Synthetic
  source 1..19: mol_type = other RNA
aatttgggttcaatgtcag

SEQ ID NO: 933 - RNA, 19 nt, synthetic construct
  misc_feature 1..19: note = Synthetic
  source 1..19: mol_type = other RNA
aatgtcagcaaactgggct

SEQ ID NO: 934 - RNA, 19 nt, synthetic construct
  misc_feature 1..19: note = Synthetic
  source 1..19: mol_type = other RNA
caatgtcagcaaactgggc

SEQ ID NO: 935 - RNA, 19 nt, synthetic construct
  misc_feature 1..19: note = Synthetic
  source 1..19: mol_type = other RNA
aatggtttcgcagccgggc

SEQ ID NO: 936 - RNA, 19 nt, synthetic construct
  misc_feature 1..19: note = Synthetic
  source 1..19: mol_type = other RNA
agtttagataaattgtacc

SEQ ID NO: 937 - RNA, 19 nt, synthetic construct
  misc_feature 1..19: note = Synthetic
  source 1..19: mol_type = other RNA
ttgtacttcatgagggttg

SEQ ID NO: 938 - RNA, 19 nt, synthetic construct
  misc_feature 1..19: note = Synthetic
  source 1..19: mol_type = other RNA
ggatcaaaggctctagaag

SEQ ID NO: 939 - RNA, 19 nt, synthetic construct
  misc_feature 1..19: note = Synthetic
  source 1..19: mol_type = other RNA
gcaaccatggctttcgtcc

SEQ ID NO: 940 - RNA, 19 nt, synthetic construct
  misc_feature 1..19: note = Synthetic
  source 1..19: mol_type = other RNA
ggtttattgagttcaaccc

SEQ ID NO: 941 - RNA, 19 nt, synthetic construct
  misc_feature 1..19: note = Synthetic
  source 1..19: mol_type = other RNA
atccaggtgatcttatcgc

SEQ ID NO: 942 - RNA, 19 nt, synthetic construct
  misc_feature 1..19: note = Synthetic
  source 1..19: mol_type = other RNA
attgagttcaaccctcaca

SEQ ID NO: 943 - RNA, 19 nt, synthetic construct
  misc_feature 1..19: note = Synthetic
  source 1..19: mol_type = other RNA
aaattgtacctaatataga

SEQ ID NO: 944 - RNA, 19 nt, synthetic construct
  misc_feature 1..19: note = Synthetic
  source 1..19: mol_type = other RNA
ttgcgtaccttgtagcata

SEQ ID NO: 945 - RNA, 19 nt, synthetic construct
  misc_feature 1..19: note = Synthetic
  source 1..19: mol_type = other RNA
tagaagacgtctttaccga

SEQ ID NO: 946 - RNA, 19 nt, synthetic construct
  misc_feature 1..19: note = Synthetic
  source 1..19: mol_type = other RNA
attcgaagtatacctccac

SEQ ID NO: 947 - RNA, 19 nt, synthetic construct
  misc_feature 1..19: note = Synthetic
  source 1..19: mol_type = other RNA
ttactttagctcgtgctct

SEQ ID NO: 948 - RNA, 19 nt, synthetic construct
  misc_feature 1..19: note = Synthetic
  source 1..19: mol_type = other RNA
ctttagctcgtgctctctc

SEQ ID NO: 949 - RNA, 19 nt, synthetic construct
  misc_feature 1..19: note = Synthetic
  source 1..19: mol_type = other RNA
tttattgagttcaaccctc

SEQ ID NO: 950 - RNA, 19 nt, synthetic construct
  misc_feature 1..19: note = Synthetic
  source 1..19: mol_type = other RNA
cagtctatcaaatttgggt

SEQ ID NO: 951 - RNA, 19 nt, synthetic construct
  misc_feature 1..19: note = Synthetic
  source 1..19: mol_type = other RNA
tgcccggataacaagcaac

SEQ ID NO: 952 - RNA, 19 nt, synthetic construct
  misc_feature 1..19: note = Synthetic
  source 1..19: mol_type = other RNA
atatacatgtcacacatct

SEQ ID NO: 953 - RNA, 19 nt, synthetic construct
  misc_feature 1..19: note = Synthetic
  source 1..19: mol_type = other RNA
ccaccacacagatgccgtg

SEQ ID NO: 954 - RNA, 19 nt, synthetic construct
  misc_feature 1..19: note = Synthetic
  source 1..19: mol_type = other RNA
taccaaacagttattgcgt

SEQ ID NO: 955 - RNA, 19 nt, synthetic construct
  misc_feature 1..19: note = Synthetic
  source 1..19: mol_type = other RNA
gataatatatacatgtcac

SEQ ID NO: 956 - RNA, 19 nt, synthetic construct
  misc_feature 1..19: note = Synthetic
  source 1..19: mol_type = other RNA
ttctacacagggcacttat

SEQ ID NO: 957 - RNA, 19 nt, synthetic construct
  misc_feature 1..19: note = Synthetic
  source 1..19: mol_type = other RNA
cttgttcatgcacggcacg

SEQ ID NO: 958 - RNA, 19 nt, synthetic construct
  misc_feature 1..19: note = Synthetic
  source 1..19: mol_type = other RNA
gttagatattttactttag

SEQ ID NO: 959 - RNA, 19 nt, synthetic construct
  misc_feature 1..19: note = Synthetic
  source 1..19: mol_type = other RNA
ttagctcgtgctctctcat

SEQ ID NO: 960 - RNA, 19 nt, synthetic construct
  misc_feature 1..19: note = Synthetic
  source 1..19: mol_type = other RNA
aaattctacacagggcact

SEQ ID NO: 961 - RNA, 19 nt, synthetic construct
  misc_feature 1..19: note = Synthetic
  source 1..19: mol_type = other RNA
cataacccgttccattgcc

SEQ ID NO: 962 - RNA, 19 nt, synthetic construct
  misc_feature 1..19: note = Synthetic
  source 1..19: mol_type = other RNA
attaagataatatatacat

SEQ ID NO: 963 - RNA, 19 nt, synthetic construct
  misc_feature 1..19: note = Synthetic
  source 1..19: mol_type = other RNA
atgcacggcacgatgtact

SEQ ID NO: 964 - RNA, 19 nt, synthetic construct
  misc_feature 1..19: note = Synthetic
  source 1..19: mol_type = other RNA
atagattgatgttattttg

SEQ ID NO: 965 - RNA, 19 nt, synthetic construct
  misc_feature 1..19: note = Synthetic
  source 1..19: mol_type = other RNA
agcttcccgttacagtggc

SEQ ID NO: 966 - RNA, 19 nt, synthetic construct
  misc_feature 1..19: note = Synthetic
  source 1..19: mol_type = other RNA
tcagttgtaattaaagtgc

SEQ ID NO: 967 - RNA, 19 nt, synthetic construct
  misc_feature 1..19: note = Synthetic
  source 1..19: mol_type = other RNA
tcgagcgccagcttcagcg

SEQ ID NO: 968 - RNA, 19 nt, synthetic construct
  misc_feature 1..19: note = Synthetic
  source 1..19: mol_type = other RNA
aacagttattgcgtacctt

SEQ ID NO: 969 - RNA, 19 nt, synthetic construct
  misc_feature 1..19: note = Synthetic
  source 1..19: mol_type = other RNA
aggtttattgagttcaacc

SEQ ID NO: 970 - RNA, 19 nt, synthetic construct
  misc_feature 1..19: note = Synthetic
  source 1..19: mol_type = other RNA
tgttcatgcacggcacgat

SEQ ID NO: 971 - RNA, 19 nt, synthetic construct
  misc_feature 1..19: note = Synthetic
  source 1..19: mol_type = other RNA
aatgcgaactggttgtcta

SEQ ID NO: 972 - RNA, 19 nt, synthetic construct
  misc_feature 1..19: note = Synthetic
  source 1..19: mol_type = other RNA
aaattcgaagtatacctcc

SEQ ID NO: 973 - RNA, 19 nt, synthetic construct
  misc_feature 1..19: note = Synthetic
  source 1..19: mol_type = other RNA
gcttgttcatgcacggcac

SEQ ID NO: 974 - RNA, 19 nt, synthetic construct
  misc_feature 1..19: note = Synthetic
  source 1..19: mol_type = other RNA
ttcgcagccgggctccttg

SEQ ID NO: 975 - RNA, 19 nt, synthetic construct
  misc_feature 1..19: note = Synthetic
  source 1..19: mol_type = other RNA
tcgcagccgggctccttgc

SEQ ID NO: 976 - RNA, 19 nt, synthetic construct
  misc_feature 1..19: note = Synthetic
  source 1..19: mol_type = other RNA
aacccgttccattgcccgg

SEQ ID NO: 977 - RNA, 19 nt, synthetic construct
  misc_feature 1..19: note = Synthetic
  source 1..19: mol_type = other RNA
ccttgtagcatatgctggt

SEQ ID NO: 978 - RNA, 19 nt, synthetic construct
  misc_feature 1..19: note = Synthetic
  source 1..19: mol_type = other RNA
aacaatcattattaagagg

SEQ ID NO: 979 - RNA, 19 nt, synthetic construct
  misc_feature 1..19: note = Synthetic
  source 1..19: mol_type = other RNA
gatcatgcagtacaaagtc

SEQ ID NO: 980 - RNA, 19 nt, synthetic construct
  misc_feature 1..19: note = Synthetic
  source 1..19: mol_type = other RNA
acagttattgcgtaccttg

SEQ ID NO: 981 - RNA, 19 nt, synthetic construct
  misc_feature 1..19: note = Synthetic
  source 1..19: mol_type = other RNA
tggtttcgcagccgggctc

SEQ ID NO: 982 - RNA, 19 nt, synthetic construct
  misc_feature 1..19: note = Synthetic
  source 1..19: mol_type = other RNA
gtttattgagttcaaccct

SEQ ID NO: 983 - RNA, 19 nt, synthetic construct
  misc_feature 1..19: note = Synthetic
  source 1..19: mol_type = other RNA
tagcatatgctggttgtac

SEQ ID NO: 984 - RNA, 19 nt, synthetic construct
  misc_feature 1..19: note = Synthetic
  source 1..19: mol_type = other RNA
caaccatggctttcgtccg

SEQ ID NO: 985 - RNA, 19 nt, synthetic construct
  misc_feature 1..19: note = Synthetic
  source 1..19: mol_type = other RNA
tttaaatacaagtagagtc

SEQ ID NO: 986 - RNA, 19 nt, synthetic construct
  misc_feature 1..19: note = Synthetic
  source 1..19: mol_type = other RNA
tccttgccgaggaagtcgt

SEQ ID NO: 987 - RNA, 19 nt, synthetic construct
  misc_feature 1..19: note = Synthetic
  source 1..19: mol_type = other RNA
ttaatcatcagtcactggc

SEQ ID NO: 988 - RNA, 19 nt, synthetic construct
  misc_feature 1..19: note = Synthetic
  source 1..19: mol_type = other RNA
tacctccacttaccttggc

SEQ ID NO: 989 - RNA, 19 nt, synthetic construct
  misc_feature 1..19: note = Synthetic
  source 1..19: mol_type = other RNA
tgagttcaaccctcacacc

SEQ ID NO: 990 - RNA, 19 nt, synthetic construct
  misc_feature 1..19: note = Synthetic
  source 1..19: mol_type = other RNA
tttactttagctcgtgctc

SEQ ID NO: 991 - RNA, 19 nt, synthetic construct
  misc_feature 1..19: note = Synthetic
  source 1..19: mol_type = other RNA
aacagcagtctatcaaatt

SEQ ID NO: 992 - RNA, 19 nt, synthetic construct
  misc_feature 1..19: note = Synthetic
  source 1..19: mol_type = other RNA
gataacaagcaaccatggc

SEQ ID NO: 993 - RNA, 19 nt, synthetic construct
  misc_feature 1..19: note = Synthetic
  source 1..19: mol_type = other RNA
ttcatgagggttgcgacgg

SEQ ID NO: 994 - RNA, 19 nt, synthetic construct
  misc_feature 1..19: note = Synthetic
  source 1..19: mol_type = other RNA
taccttgtagcatatgctg

SEQ ID NO: 995 - RNA, 19 nt, synthetic construct
  misc_feature 1..19: note = Synthetic
  source 1..19: mol_type = other RNA
gagttcaaccctcacacct

SEQ ID NO: 996 - RNA, 19 nt, synthetic construct
  misc_feature 1..19: note = Synthetic
  source 1..19: mol_type = other RNA
agatattttactttagctc

SEQ ID NO: 997 - RNA, 19 nt, synthetic construct
  misc_feature 1..19: note = Synthetic
  source 1..19: mol_type = other RNA
gtagctgcccagcttcccg

SEQ ID NO: 998 - RNA, 19 nt, synthetic construct
  misc_feature 1..19: note = Synthetic
  source 1..19: mol_type = other RNA
gcccggataacaagcaacc

SEQ ID NO: 999 - RNA, 19 nt, synthetic construct
  misc_feature 1..19: note = Synthetic
  source 1..19: mol_type = other RNA
tcagtttagataaattgta

SEQ ID NO: 1000 - RNA, 19 nt, synthetic construct
  misc_feature 1..19: note = Synthetic
  source 1..19: mol_type = other RNA
tctccttgccgaggaagtc

SEQ ID NO: 1001 - RNA, 19 nt, synthetic construct
  misc_feature 1..19: note = Synthetic
  source 1..19: mol_type = other RNA
ctcatgagcagcccaatgg

SEQ ID NO: 1002 - RNA, 19 nt, synthetic construct
  misc_feature 1..19: note = Synthetic
  source 1..19: mol_type = other RNA
agttgtaattaaagtgctc

SEQ ID NO: 1003 - RNA, 19 nt, synthetic construct
  misc_feature 1..19: note = Synthetic
  source 1..19: mol_type = other RNA
tttcgcagccgggctcctt

SEQ ID NO: 1004 - RNA, 19 nt, synthetic construct
  misc_feature 1..19: note = Synthetic
  source 1..19: mol_type = other RNA
taagataatatatacatgt

SEQ ID NO: 1005 - RNA, 19 nt, synthetic construct
  misc_feature 1..19: note = Synthetic
  source 1..19: mol_type = other RNA
gaagtatacctccacttac

SEQ ID NO: 1006 - RNA, 19 nt, synthetic construct
  misc_feature 1..19: note = Synthetic
  source 1..19: mol_type = other RNA
tagctgcccagcttcccgt

SEQ ID NO: 1007 - RNA, 19 nt, synthetic construct
  misc_feature 1..19: note = Synthetic
  source 1..19: mol_type = other RNA
tgtcgtgcagggcgcgcac

SEQ ID NO: 1008 - RNA, 19 nt, synthetic construct
  misc_feature 1..19: note = Synthetic
  source 1..19: mol_type = other RNA
tcgtctgcccgttgggccg

SEQ ID NO: 1009 - RNA, 19 nt, synthetic construct
  misc_feature 1..19: note = Synthetic
  source 1..19: mol_type = other RNA
cttcatgagggttgcgacg

SEQ ID NO: 1010 - RNA, 19 nt, synthetic construct
  misc_feature 1..19: note = Synthetic
  source 1..19: mol_type = other RNA
tcatactacactcagagac

SEQ ID NO: 1011 - RNA, 19 nt, synthetic construct
  misc_feature 1..19: note = Synthetic
  source 1..19: mol_type = other RNA
tatacctccacttaccttg

SEQ ID NO: 1012 - RNA, 19 nt, synthetic construct
  misc_feature 1..19: note = Synthetic
  source 1..19: mol_type = other RNA
gatcaaaggctctagaaga

SEQ ID NO: 1013 - RNA, 19 nt, synthetic construct
  misc_feature 1..19: note = Synthetic
  source 1..19: mol_type = other RNA
cccggtgtcgtgcagggcg

SEQ ID NO: 1014 - RNA, 19 nt, synthetic construct
  misc_feature 1..19: note = Synthetic
  source 1..19: mol_type = other RNA
ccgtgcttgttcatgcacg

SEQ ID NO: 1015 - RNA, 19 nt, synthetic construct
  misc_feature 1..19: note = Synthetic
  source 1..19: mol_type = other RNA
aatctgtgctgcgcggatg

SEQ ID NO: 1016 - RNA, 19 nt, synthetic construct
  misc_feature 1..19: note = Synthetic
  source 1..19: mol_type = other RNA
atgctgctcatgagcagcc

SEQ ID NO: 1017 - RNA, 19 nt, synthetic construct
  misc_feature 1..19: note = Synthetic
  source 1..19: mol_type = other RNA
ttcccggtgtcgtgcaggg

SEQ ID NO: 1018 - RNA, 19 nt, synthetic construct
  misc_feature 1..19: note = Synthetic
  source 1..19: mol_type = other RNA
ttctggctgaccagctgcc

SEQ ID NO: 1019 - RNA, 19 nt, synthetic construct
  misc_feature 1..19: note = Synthetic
  source 1..19: mol_type = other RNA
caacatgacgtacataacc

SEQ ID NO: 1020 - RNA, 19 nt, synthetic construct
  misc_feature 1..19: note = Synthetic
  source 1..19: mol_type = other RNA
ttcgtctgcccgttgggcc

SEQ ID NO: 1021 - RNA, 19 nt, synthetic construct
  misc_feature 1..19: note = Synthetic
  source 1..19: mol_type = other RNA
tgtagctgcccagcttccc

SEQ ID NO: 1022 - RNA, 19 nt, synthetic construct
  misc_feature 1..19: note = Synthetic
  source 1..19: mol_type = other RNA
ttgtagctgcccagcttcc

SEQ ID NO: 1023 - RNA, 19 nt, synthetic construct
  misc_feature 1..19: note = Synthetic
  source 1..19: mol_type = other RNA
tacaagtagagtctaatac

SEQ ID NO: 1024 - RNA, 19 nt, synthetic construct
  misc_feature 1..19: note = Synthetic
  source 1..19: mol_type = other RNA
atgagcagcccaatggttt

SEQ ID NO: 1025 - RNA, 19 nt, synthetic construct
  misc_feature 1..19: note = Synthetic
  source 1..19: mol_type = other RNA
tgctgctcatgagcagccc

SEQ ID NO: 1026 - RNA, 19 nt, synthetic construct
  misc_feature 1..19: note = Synthetic
  source 1..19: mol_type = other RNA
ttaatccaatctcttgcgc

SEQ ID NO: 1027 - RNA, 19 nt, synthetic construct
  misc_feature 1..19: note = Synthetic
  source 1..19: mol_type = other RNA
tatttaaactttaacggaa

SEQ ID NO: 1028 - RNA, 19 nt, synthetic construct
  misc_feature 1..19: note = Synthetic
  source 1..19: mol_type = other RNA
tctatttcaagaagccctg

SEQ ID NO: 1029 - RNA, 19 nt, synthetic construct
  misc_feature 1..19: note = Synthetic
  source 1..19: mol_type = other RNA
ttgttcatgcacggcacga

SEQ ID NO: 1030 - RNA, 19 nt, synthetic construct
  misc_feature 1..19: note = Synthetic
  source 1..19: mol_type = other RNA
tcgtgcagggcgcgcacct

SEQ ID NO: 1031 - RNA, 19 nt, synthetic construct
  misc_feature 1..19: note = Synthetic
  source 1..19: mol_type = other RNA
tgagcagcccaatggtttc

SEQ ID NO: 1032 - RNA, 19 nt, synthetic construct
  misc_feature 1..19: note = Synthetic
  source 1..19: mol_type = other RNA
gtctgcccgttgggccgca

SEQ ID NO: 1033 - RNA, 19 nt, synthetic construct
  misc_feature 1..19: note = Synthetic
  source 1..19: mol_type = other RNA
tattgagttcaaccctcac

SEQ ID NO: 1034 - RNA, 19 nt, synthetic construct
  misc_feature 1..19: note = Synthetic
  source 1..19: mol_type = other RNA
tgcttgttcatgcacggca

SEQ ID NO: 1035 - RNA, 19 nt, synthetic construct
  misc_feature 1..19: note = Synthetic
  source 1..19: mol_type = other RNA
tgttaatccaatctcttgc

SEQ ID NO: 1036 - RNA, 19 nt, synthetic construct
  misc_feature 1..19: note = Synthetic
  source 1..19: mol_type = other RNA
attaggagcactaggtggg

SEQ ID NO: 1037 - RNA, 19 nt, synthetic construct
  misc_feature 1..19: note = Synthetic
  source 1..19: mol_type = other RNA
gttcatgcacggcacgatg

SEQ ID NO: 1038 - RNA, 19 nt, synthetic construct
  misc_feature 1..19: note = Synthetic
  source 1..19: mol_type = other RNA
tcatgcacggcacgatgta

SEQ ID NO: 1039 - RNA, 19 nt, synthetic construct
  misc_feature 1..19: note = Synthetic
  source 1..19: mol_type = other RNA
cgtgcttgttcatgcacgg

SEQ ID NO: 1040 - RNA, 19 nt, synthetic construct
  misc_feature 1..19: note = Synthetic
  source 1..19: mol_type = other RNA
aactccagtagcattgtcg

SEQ ID NO: 1041 - RNA, 19 nt, synthetic construct
  misc_feature 1..19: note = Synthetic
  source 1..19: mol_type = other RNA
aatagaatctgtgctgcgc

SEQ ID NO: 1042 - RNA, 19 nt, synthetic construct
  misc_feature 1..19: note = Synthetic
  source 1..19: mol_type = other RNA
aaacacatgtggtgcttgc

SEQ ID NO: 1043 - RNA, 19 nt, synthetic construct
  misc_feature 1..19: note = Synthetic
  source 1..19: mol_type = other RNA
taatagaatctgtgctgcg

SEQ ID NO: 1044 - RNA, 19 nt, synthetic construct
  misc_feature 1..19: note = Synthetic
  source 1..19: mol_type = other RNA
tgcccgttgggccgcaggc

SEQ ID NO: 1045 - RNA, 19 nt, synthetic construct
  misc_feature 1..19: note = Synthetic
  source 1..19: mol_type = other RNA
agtgaggcaatgaatgtcc

SEQ ID NO: 1046 - RNA, 19 nt, synthetic construct
  misc_feature 1..19: note = Synthetic
  source 1..19: mol_type = other RNA
ttcaaatttcaaaccgaac

SEQ ID NO: 1047 - RNA, 19 nt, synthetic construct
  misc_feature 1..19: note = Synthetic
  source 1..19: mol_type = other RNA
tcatgagggttgcgacggt

SEQ ID NO: 1048 - RNA, 19 nt, synthetic construct
  misc_feature 1..19: note = Synthetic
  source 1..19: mol_type = other RNA
aaataccaaacagttattg

SEQ ID NO: 1049 - RNA, 19 nt, synthetic construct
  misc_feature 1..19: note = Synthetic
  source 1..19: mol_type = other RNA
ggacttctctcaattttct

SEQ ID NO: 1050 - RNA, 19 nt, synthetic construct
  misc_feature 1..19: note = Synthetic
  source 1..19: mol_type = other RNA
cttgtttgtggtacttcat

SEQ ID NO: 1051 - RNA, 19 nt, synthetic construct
  misc_feature 1..19: note = Synthetic
  source 1..19: mol_type = other RNA
gaaaggtgttcaagtacca

SEQ ID NO: 1052 - RNA, 19 nt, synthetic construct
  misc_feature 1..19: note = Synthetic
  source 1..19: mol_type = other RNA
cctgtatctactacctgaa

SEQ ID NO: 1053 - RNA, 21 nt, synthetic construct
  misc_feature 1..21: note = Synthetic
  modified_base 1..3: mod_base = OTHER; note = 2'-deoxy-2'-fluoro modified nucleotide
  modified_base 4..11: mod_base = OTHER; note = 2'-O-methyl modified nucleotide
  modified_base 12..13: mod_base = OTHER; note = 2'-deoxy-2'-fluoro modified nucleotide
  modified_base 14..16: mod_base = OTHER; note = 2'-O-methyl modified nucleotide
  modified_base 20..21: mod_base = OTHER; note = 2'-O-methyl modified nucleotide
  source 1..21: mol_type = other RNA
cctgaagagagttaaaagatt

SEQ ID NO: 1054 - DNA, 21 bp, synthetic construct
  misc_feature 1..21: note = Synthetic
  misc_feature 1..19: note = ribonucleotide unmodified or modified as described for this sequence
  misc_feature 1: note = Nucleotide linked to an inverted abasic cap
  modified_base 1..6: mod_base = OTHER; note = 2'-deoxy-2'-fluoro modified nucleotide
  modified_base 9..16: mod_base = OTHER; note = 2'-deoxy-2'-fluoro modified nucleotide
  misc_feature 21: note = Nucleotide linked to an inverted abasic cap
  source 1..21: mol_type = other DNA
  misc_feature 1..6: note = RNA
  misc_feature 7..8: note = DNA
  misc_feature 9..16: note = RNA
  misc_feature 17..21: note = DNA
tcttttaactctcttcaggtt

SEQ ID NO: 1055 - DNA, 21 bp, synthetic construct
  misc_feature 1..21: note = Synthetic
  misc_feature 1..19: note = ribonucleotide unmodified or modified as described for this sequence
  misc_feature 1: note = Nucleotide linked to an inverted abasic cap
  modified_base 1..3: mod_base = OTHER; note = 2'-deoxy-2'-fluoro modified nucleotide
  modified_base 5..7: mod_base = OTHER; note = 2'-deoxy-2'-fluoro modified nucleotide
  modified_base 9: mod_base = OTHER; note = 2'-deoxy-2'-fluoro modified nucleotide
  modified_base 12: mod_base = OTHER; note = 2'-deoxy-2'-fluoro modified nucleotide
  modified_base 14..17: mod_base = OTHER; note = 2'-deoxy-2'-fluoro modified nucleotide
  modified_base 19: mod_base = OTHER; note = 2'-deoxy-2'-fluoro modified nucleotide
  misc_feature 21: note = Nucleotide linked to an inverted abasic cap
  source 1..21: mol_type = other DNA
  misc_feature 1..3: note = RNA
  misc_feature 4: note = DNA
  misc_feature 5..7: note = RNA
  misc_feature 8: note = DNA
  misc_feature 9: note = RNA
  misc_feature 10..11: note = DNA
  misc_feature 12: note = RNA
  misc_feature 13: note = DNA
  misc_feature 14..17: note = RNA
  misc_feature 18: note = DNA
  misc_feature 19: note = RNA
  misc_feature 20..21: note = DNA
cttgtttgtggtacttcattt

SEQ ID NO: 1056 - RNA, 21 nt, synthetic construct
  misc_feature 1..21: note = Synthetic
  modified_base 4..6: mod_base = OTHER; note = 2'-O-methyl modified nucleotide
  modified_base 7: mod_base = OTHER; note = 2'-deoxy-2'-fluoro modified nucleotide
  modified_base 8: mod_base = OTHER; note = 2'-O-methyl modified nucleotide
  modified_base 9..10: mod_base = OTHER; note = 2'-deoxy-2'-fluoro modified nucleotide
  modified_base 11: mod_base = OTHER; note = 2'-O-methyl modified nucleotide
  modified_base 12: mod_base = OTHER; note = 2'-deoxy-2'-fluoro modified nucleotide
  modified_base 13: mod_base = OTHER; note = 2'-O-methyl modified nucleotide
  modified_base 15: mod_base = OTHER; note = 2'-O-methyl modified nucleotide
  modified_base 16: mod_base = OTHER; note = 2'-deoxy-2'-fluoro modified nucleotide
  modified_base 17..21: mod_base = OTHER; note = 2'-O-methyl modified nucleotide
  source 1..21: mol_type = other RNA
atgaagtaccacaaacaagtt

SEQ ID NO: 1057 - DNA, 21 bp, synthetic construct
  misc_feature 1..21: note = Synthetic
  misc_feature 1..19: note = ribonucleotide unmodified or modified as described for this sequence
  misc_feature 1: note = Nucleotide linked to an inverted abasic cap
  modified_base 7: mod_base = OTHER; note = 2'-deoxy-2'-fluoro modified nucleotide
  modified_base 9..11: mod_base = OTHER; note = 2'-deoxy-2'-fluoro modified nucleotide
  modified_base 15: mod_base = OTHER; note = 2'-deoxy-2'-fluoro modified nucleotide
  modified_base 17..18: mod_base = OTHER; note = 2'-deoxy-2'-fluoro modified nucleotide
  misc_feature 21: note = Nucleotide linked to an inverted abasic cap
  source 1..21: mol_type = other DNA
  misc_feature 1..6: note = DNA
  misc_feature 7: note = RNA
  misc_feature 8: note = DNA
  misc_feature 9..11: note = RNA
  misc_feature 12..14: note = DNA
  misc_feature 15: note = RNA
  misc_feature 16: note = DNA
  misc_feature 17..18: note = RNA
  misc_feature 19..21: note = DNA
gaaaggtgttcaagtaccatt

SEQ ID NO: 1058 - RNA, 21 nt, synthetic construct
  misc_feature 1..21: note = Synthetic
  modified_base 4: mod_base = OTHER; note = 2'-deoxy-2'-fluoro modified nucleotide
  modified_base 5: mod_base = OTHER; note = 2'-O-methyl modified nucleotide
  modified_base 6..8: mod_base = OTHER; note = 2'-deoxy-2'-fluoro modified nucleotide
  modified_base 9..11: mod_base = OTHER; note = 2'-O-methyl modified nucleotide
  modified_base 12: mod_base = OTHER; note = 2'-deoxy-2'-fluoro modified nucleotide
  modified_base 13: mod_base = OTHER; note = 2'-O-methyl modified nucleotide
  modified_base 14..19: mod_base = OTHER; note = 2'-deoxy-2'-fluoro modified nucleotide
  modified_base 20..21: mod_base = OTHER; note = 2'-O-methyl modified nucleotide
  source 1..21: mol_type = other RNA
tggtacttgaacacctttctt

SEQ ID NO: 1059 - DNA, 21 bp, synthetic construct
  misc_feature 1..21: note = Synthetic
  misc_feature 1..19: note = ribonucleotide unmodified or modified as described for this sequence
  misc_feature 1: note = Nucleotide linked to an inverted abasic cap
  modified_base 1..3: mod_base = OTHER; note = 2'-deoxy-2'-fluoro modified nucleotide
  modified_base 5: mod_base = OTHER; note = 2'-deoxy-2'-fluoro modified nucleotide
  modified_base 7..9: mod_base = OTHER; note = 2'-deoxy-2'-fluoro modified nucleotide
  modified_base 11..12: mod_base = OTHER; note = 2'-deoxy-2'-fluoro modified nucleotide
  modified_base 14..16: mod_base = OTHER; note = 2'-deoxy-2'-fluoro modified nucleotide
  misc_feature 21: note = Nucleotide linked to an inverted abasic cap
  source 1..21: mol_type = other DNA
  misc_feature 1..3: note = RNA
  misc_feature 4: note = DNA
  misc_feature 5: note = RNA
  misc_feature 6: note = DNA
  misc_feature 7..9: note = RNA
  misc_feature 10: note = DNA
  misc_feature 11..12: note = RNA
  misc_feature 13: note = DNA
  misc_feature 14..16: note = RNA
  misc_feature 17..21: note = DNA
cctgtatctactacctgaatt

SEQ ID NO: 1060 - RNA, 21 nt, synthetic construct
  misc_feature 1..21: note = Synthetic
  modified_base 4..6: mod_base = OTHER; note = 2'-O-methyl modified nucleotide
  modified_base 7: mod_base = OTHER; note = 2'-deoxy-2'-fluoro modified nucleotide
  modified_base 8..9: mod_base = OTHER; note = 2'-O-methyl modified nucleotide
  modified_base 10: mod_base = OTHER; note = 2'-deoxy-2'-fluoro modified nucleotide
  modified_base 11..13: mod_base = OTHER; note = 2'-O-methyl modified nucleotide
  modified_base 14: mod_base = OTHER; note = 2'-deoxy-2'-fluoro modified nucleotide
  modified_base 15: mod_base = OTHER; note = 2'-O-methyl modified nucleotide
  modified_base 16: mod_base = OTHER; note = 2'-deoxy-2'-fluoro modified nucleotide
  modified_base 17..21: mod_base = OTHER; note = 2'-O-methyl modified nucleotide
  source 1..21: mol_type = other RNA
ttcaggtagtagatacaggtt

SEQ ID NO: 1061 - RNA, 19 nt, synthetic construct
  misc_feature 1..19: note = Synthetic
  source 1..19: mol_type = other RNA
agaaaattgagagaagtcc

SEQ ID NO: 1062 - RNA, 19 nt, synthetic construct
  misc_feature 1..19: note = Synthetic
  source 1..19: mol_type = other RNA
atgaagtaccacaaacaag

SEQ ID NO: 1063 - RNA, 19 nt, synthetic construct
  misc_feature 1..19: note = Synthetic
  source 1..19: mol_type = other RNA
tggtacttgaacacctttc

SEQ ID NO: 1064 - RNA, 19 nt, synthetic construct
  misc_feature 1..19: note = Synthetic
  source 1..19: mol_type = other RNA
ttcaggtagtagatacagg

SEQ ID NO: 1065 - DNA, 23 bp, synthetic construct
  source 1..23: mol_type = other DNA
cgactggagcacgaggacactga

SEQ ID NO: 1066 - DNA, 26 bp, synthetic construct
  source 1..26: mol_type = other DNA
ggacactgacatggactgaaggagta

SEQ ID NO: 1067 - DNA, 16 bp, synthetic construct
  source 1..16: mol_type = other DNA
ggcaaaatagaagact

SEQ ID NO: 1068 - DNA, 21 bp, synthetic construct
  source 1..21: mol_type = other DNA
cctccgacagcgtctcctctt

SEQ ID NO: 1069 - DNA, 24 bp, synthetic construct
  source 1..24: mol_type = other DNA
acatcgtgccgtgcatgaacaagc

SEQ ID NO: 1070 - DNA, 25 bp, synthetic construct
  source 1..25: mol_type = other DNA
caaatggagatggaagatgcgtgac
